(19) United States
(12) Patent Application Publication
(10) Pub. No.: US 2023/0390346 A1
(43) Pub. Date: Dec. 7, 2023

(54) PROBIOTIC BACILLUS COMPOSITIONS AND METHODS OF USE

(71) Applicant: ELANCO US INC., Greenfield, IN (US)

(72) Inventors: Dharanesh Mahimapura Gangaiah, Fishers, IN (US); Arvind Kumar, Fishers, IN (US); Shrinivasrao Peerajirao Mane, Fishers, IN (US); Dwi Susanti, Fishers, IN (US); Alyssa Volland, Fishers, IN (US)

(21) Appl. No.: 18/028,378

(22) PCT Filed: Sep. 24, 2021
(86) PCT No.: PCT/US2021/051973

§ 371 Date: Mar. 24, 2023

Related U.S. Application Data
(60) Provisional application No. 63/083,697, filed on Sep. 25, 2020.
(60) Provisional application No. 63/241,369, filed on Sep. 7, 2021.

(51) Int. Cl. A61K 35/742; C12N 1/20; A61K 39/012; A61K 9/00; A61P 39/00; A23K 50/75; A23K 10/18

(52) U.S. Cl. CPC A61K 35/742; C12N 1/205; A61K 39/012; C12R 2001/07; A61P 39/00; A23K 50/75; A23K 10/18; A61K 9/0056

(57) ABSTRACT

The present invention relates to probiotic compositions and methods for improving animal health and animal production. The probiotic compositions include one, two, three, or more isolated strains of novel Bacillus strains which are capable of colonizing the gastrointestinal tract to improve the health of an animal. The probiotic compositions include a combination of at least one Bacillus amyloliquefaciens strain and a Bacillus subtilis strain.

### SEQUENCE LISTING

[0001] This application contains a Sequence Listing, which was submitted in ASCII format via EFS-Web, and is hereby incorporated by reference in its entirety. The ASCII copy, created on Sep. 24, 2021, is named “2848-5 PCT SequenceListing_ST25.txt” and is 43,201,563 bytes in size.

### FIELD OF THE INVENTION

[0002] The present invention relates to probiotic compositions and methods for improving animal health. The probiotic compositions include one or more isolated strains of Bacillus sp. which colonizes the gastrointestinal tract to improve the health and production performance of an animal.

### BACKGROUND

[0003] Direct fed microbials (DFMs), often also called probiotics, are microorganisms which colonize the gastrointestinal tract of an animal and provide some beneficial effect to that animal. The microorganisms can be bacterial species, for example those from the genera Bacillus, Lactobacillus, Lactococcus, and Enterococcus. The microorganisms can also be yeast or even molds. The microorganisms can be provided to an animal orally or mucosally or, in the case of birds, provided to a fertilized egg, i.e. in ovo.

[0004] The beneficial activity provided by a DFM can be through the synthesis and secretion of vitamins or other nutritional molecules needed for a healthy metabolism of the host animal. A DFM can also protect the host animal from disease, disorders, or clinical symptoms caused by pathogenic microorganisms or other agents. For example, the DFM may naturally produce factors having inhibitory or cytotoxic activity against certain species of pathogens, such as deleterious or disease-causing bacteria.

[0005] Probiotics and DFMs provide an attractive alternative or addition to the use and application of antibiotics in animals. Antibiotics can promote resistant or less sensitive bacteria and can ultimately end up in feed products or foods consumed by other animals or humans.

[0006] There is a need in the art for probiotic compositions and methods that provide improved delivery of beneficial molecules to the gastrointestinal tract of an animal and thus improve animal health.

[0007] The citation of references herein shall not be construed as an admission that such is prior art to the present invention.

### SUMMARY OF THE INVENTION

[0008] The invention provides compositions and methods for improving animal health and animal production and performance.

[0009] In one embodiment, the invention provides a probiotic composition having at least one of: a first isolated Bacillus amyloliquefaciens strain, a second isolated Bacillus amyloliquefaciens strain, and a first isolated Bacillus subtilis strain; and a carrier suitable for animal administration; wherein said composition reduces or inhibits the colonization of an animal by a pathogenic bacterium when an effective amount is administered to an animal, as compared to an animal not administered the composition.

[0010] In an embodiment, the first isolated Bacillus amyloliquefaciens strain includes a nucleic acid sequence having at least 95%, at least 96%, at least 97%, at least 98%, or at least 99% sequence identity with at least one of: SEQ ID NO: 59, 10 61, 63, 65, 67, 69, 71, 73, 1, 2, 3, 4, and 5. In an embodiment, the second Bacillus amyloliquefaciens strain includes a nucleic acid sequence having at least 95%, at least 96%, at least 97%, at least 98%, or at least 99% sequence identity with at least one of: SEQ ID NO: 133, 135, 137, 139, 141, 143, 145, 147, 6, 7, 8, 9, 10, and 11. In an embodiment, the first isolated Bacillus amyloliquefaciens strain includes a nucleic acid sequence having at least 95%, at least 96%, at least 97%, at least 98%, or at least 99% sequence identity with SEQ ID NO: 261. In an embodiment, the first isolated Bacillus amyloliquefaciens strain includes a nucleic acid sequence having at least 95%, at least 96%, at least 97%, at least 98%, or at least 99% sequence identity with SEQ ID NO: 261 and having a nucleic acid sequence having least 95%, at least 96%, at least 97%, at least 98%, or at least 99% sequence identity with at least one of a nucleic acid sequence encoding a polypeptide or amino acid sequence SEQ ID NO: 263, 264, 265, 266, 267, 268, 269, 270, 271, 272, 273, 274, 275 and 276. In an embodiment, the second isolated Bacillus amyloliquefaciens strain includes a nucleic acid sequence having at least 95%, at least 96%, at least 97%, at least 98%, or at least 99% sequence identity with SEQ ID NO: 262. In an embodiment, the second isolated Bacillus amyloliquefaciens strain includes a nucleic acid sequence having at least 95%, at least 96%, at least 97%, at least 98%, or at least 99% sequence identity with SEQ ID NO: 262 and having a nucleic acid sequence having least 95%, at least 96%, at least 97%, at least 98%, or at least 99% sequence identity with at least one of a nucleic acid sequence encoding a polypeptide or amino acid sequence SEQ ID NO: 277, 278, 279, 280, 281, 282, 283 and 284.

[0011] In an embodiment, the first Bacillus subtilis strain includes a nucleic acid sequence having least 95%, at least 96%, at least 97%, at least 98%, or at least 99% sequence identity with at least one of: SEQ ID NO:257, 253, 251, 249, 247, 245, 243, 12, 13, 14, 15, and 16. In an embodiment, the first Bacillus subtilis strain includes a nucleic acid sequence having least 95%, at least 96%, at least 97%, at least 98%, or at least 99% sequence identity with at least one of 12, 13, 14, 15, and 16. In an embodiment, the first Bacillus subtilis strain includes a nucleic acid sequence having least 95%, at least 96%, at least 97%, at least 98%, or at least 99% sequence identity with at least one of 12, 13, 14, 15, and 16 and having a nucleic acid sequence having least 95%, at least 96%, at least 97%, at least 98%, or at least 99% sequence identity with at least one of a nucleic acid sequence encoding a polypeptide or amino acid sequence SEQ ID NO: 285, 286, 287, 288, 289, 290, 291, 292, 293, 294, 295, 296, 297, 298, 299, 300, 301, 302, 303, 304 and 305.

[0012] In an embodiment, the invention provides a feed additive comprising a combination of Bacillus strains. In one embodiment the feed additive comprises lyophilized or otherwise dried spores or spore forms of a combination of Bacillus strains. In one embodiment, the feed additive comprising a combination of one or more isolated Bacillus amyloliquefaciens strain and an isolated Bacillus subtilis strain. In one embodiment, the feed additive comprises a combination of a first isolated Bacillus amyloliquefaciens strain, a second isolated Bacillus amyloliquefaciens strain, and a first isolated Bacillus subtilis strain. In an embodiment, the additive further comprises a carrier suitable for animal administration. In one embodiment, the feed additive further comprises a nutritional source such as a sugar. In one embodiment, the feed additive further comprises a prebiotic. In an embodiment, the feed additive is a probiotic feed additive and comprises a combination of a first isolated Bacillus amyloliquefaciens strain, a second isolated Bacillus amyloliquefaciens strain, and a first isolated Bacillus subtilis strain; and a carrier suitable for animal administration; wherein said composition reduces or inhibits the colonization of an animal by a pathogenic bacterium when an effective amount is administered to an animal, as compared to an animal not administered the composition.

[0013] In an embodiment, the first isolated Bacillus amyloliquefaciens strain includes a nucleic acid sequence having at least 95%, at least 96%, at least 97%, at least 98%, or at least 99% sequence identity with at least one of: SEQ ID NO: 59, 10 61, 63, 65, 67, 69, 71, 73, 1, 2, 3, 4, and 5. In an embodiment, the second Bacillus amyloliquefaciens strain includes a nucleic acid sequence having at least 95%, at least 96%, at least 97%, at least 98%, or at least 99% sequence identity with at least one of: SEQ ID NO: 133, 135, 137, 139, 141, 143, 145, 147, 6, 7, 8, 9, 10, and 11. In an embodiment, the first isolated Bacillus amyloliquefaciens strain includes a nucleic acid sequence having at least 95%, at least 96%, at least 97%, at least 98%, or at least 99% sequence identity with SEQ ID NO: 261. In an embodiment, the first isolated Bacillus amyloliquefaciens strain includes a nucleic acid sequence having at least 95%, at least 96%, at least 97%, at least 98%, or at least 99% sequence identity with SEQ ID NO: 261 and having a nucleic acid sequence having least 95%, at least 96%, at least 97%, at least 98%, or at least 99% sequence identity with at least one of a nucleic acid sequence encoding a polypeptide or amino acid sequence SEQ ID NO: 263, 264, 265, 266, 267, 268, 269, 270, 271, 272, 273, 274, 275 and 276. In an embodiment, the second isolated Bacillus amyloliquefaciens strain includes a nucleic acid sequence having at least 95%, at least 96%, at least 97%, at least 98%, or at least 99% sequence identity with SEQ ID NO: 262. In an embodiment, the second isolated Bacillus amyloliquefaciens strain includes a nucleic acid sequence having at least 95%, at least 96%, at least 97%, at least 98%, or at least 99% sequence identity with SEQ ID NO: 262 and having a nucleic acid sequence having least 95%, at least 96%, at least 97%, at least 98%, or at least 99% sequence identity with at least one of a nucleic acid sequence encoding a polypeptide or amino acid sequence SEQ ID NO: 277, 278, 279, 280, 281, 282, 283 and 284.

[0014] In an embodiment, the feed additive comprises a first isolated Bacillus amyloliquefaciens strain including ELA191024 or a second isolated Bacillus amyloliquefaciens strain including ELA191036, and a first isolated Bacillus subtilis strain including ELA191105. In an embodiment, the feed additive includes a first isolated Bacillus amyloliquefaciens strain including ELA191024 or a second isolated Bacillus amyloliquefaciens strain including ELA191006, and a first isolated Bacillus subtilis strain including ELA191105. In some embodiments, the feed additive includes a first isolated Bacillus amyloliquefaciens strain ELA191024 or ELA191006, a second isolated Bacillus amyloliquefaciens strain including ELA202071, and a first isolated Bacillus subtilis strain including ELA191105. In some embodiments, the feed additive includes a first isolated Bacillus amyloliquefaciens strain ELA191024, a second isolated Bacillus amyloliquefaciens strain including ELA202071, and a first isolated Bacillus subtilis strain including ELA191105. In some embodiments, the feed additive includes a first isolated Bacillus amyloliquefaciens strain ELA191006, a second isolated Bacillus amyloliquefaciens strain including ELA202071, and a first isolated Bacillus subtilis strain including ELA191105.

[0015] In an embodiment, the feed additive comprises a combination of at least two Bacillus strains provided herein. In one such embodiment, the feed additive comprises a combination of spore forms of at least two Bacillus strains provided herein.

[0016] In another embodiment of the invention, an animal feed is provided comprises a combination of at least two Bacillus strains provided herein. In one such embodiment, the feed additive comprises a combination of spore forms of at least two Bacillus strains provided herein. In an embodiment, the animal feed further comprises at least one nutritional source, such as sugar or amino acid(s). In one embodiment, the animal feed further comprises a prebiotic.

[0017] In an embodiment, the feed additive or animal feed is suitable and formulated for an animal selected from a human, poultry, cattle, cat, dog, horse, swine or fish.

[0018] In embodiments, the feed additive or animal feed is suitable for and applicable in the methods provided herein.

[0019] In one embodiment, the invention provides a method for reducing or inhibiting the colonization of an animal by a pathogenic bacterium. In one embodiment, the invention provides a method for reducing or inhibiting the colonization of the gut or gastrointestinal tract (GIT) of an animal by a pathogenic bacterium. The method includes administering to an animal an effective amount of a probiotic composition described above and herein. In an embodiment, the probiotic composition comprises a non natural and unique combination of Bacillus bacteria strains. The method includes administering to an animal an effective amount of a feed additive or animal feed described above and herein. In an embodiment, the feed additive or animal feed comprises a non natural and unique combination of Bacillus bacteria strains.

[0020] In one embodiment, the invention provides a method of treating necrotic enteritis in poultry by administering to poultry a probiotic composition described above and herein.

[0021] In one embodiment, the invention provides a method of preparing a fermentation product. The method includes the steps of (a) obtaining at least one bacterial strain selected from a first isolated Bacillus amyloliquefaciens strain described above and herein, a second isolated Bacillus amyloliquefaciens strain described above and herein, and a first isolated Bacillus subtilis strain described above and herein; (b) contacting the at least one strain of step (a) with cell growth media; (c) incubating a combination of at least one strain of step (a) and cell growth media of step (b) at a temperature of about 37° C. for an incubation time of about 24 hours; and (d) cooling the combination of step (c); wherein the product of step (d) includes the fermentation product.

[0022] In one embodiment, the invention provides a method of delivering a metabolite to the gut of an animal. The method includes administering to an animal a probiotic composition having a first isolated Bacillus amyloliquefaciens strain and a second isolated Bacillus amyloliquefaciens strain described above and herein. The metabolite includes at least one of: histidine, N-acetylhistidine, phenyllactate (PLA), 1-carboxyethyltyrosine, 3-(4-hydroxyphenyl)lactate 5 (HPLA), tryptophan, N-acetyltryptophan, anthranilate, indolelactate, isovalerylglycine, N-acetylisoleucine, N-acetylmethionine, urea, ornithine, spermidine, spermine, cysteinylglycine, pyruvate, sucrose, fumarate, deoxycarnitine, 2R,3R-dihydroxybutyrate, chiro-inositol, glycerophosphorylcholine (GPC), xanthine, AMP, 2′-deoxyadenosine, dihydroorotate, UMP, uridine, CMP, cytidine, (3′-5′)-adenylyluridine, (3′-5′)-10 cytidylyladenosine, (3′-5′)-cytidylylcytidine, (3′-5′)-cytidylyluridine, (3′-5′)-guanylylcytidine, (3′-5′)-guanylyluridine, (3′-5′)-uridylylcytidine, (3′-5′)-uridylyluridine, (3′-5′)-uridylyladenosine, NAD+, oxalate (ethanedioate), maltol, 1-methylhistidine, N6,N6-dimethyllysine, S-methylcysteine, and 2-methylcitrate.

[0023] The metabolite is secreted by the combination of the first Bacillus amyloliquefaciens strain and the second isolated Bacillus amyloliquefaciens strain.

[0024] In one embodiment, the invention provides a method of delivering a metabolite to the gut of an animal by administering a probiotic composition having a first isolated Bacillus amyloliquefaciens strain, a second isolated Bacillus amyloliquefaciens strain, and a first isolated Bacillus subtilis strain, as described herein and above. The metabolite includes at least one of: N-carbamoylserine, beta-citrylglutamate, N6-methyllysine, N6,N6-dimethyllysine, N6,N6,N6-trimethyllysine, saccharopine, cadaverine, N-succinyl-phenylalanine, 2-hydroxyphenylacetate, 3-(4-hydroxyphenyl)lactate (HPLA), N-acetyltryptophan, indolelactate, N-acetylleucine, 4-methyl-2-oxopentanoate, homocitrulline, dimethylarginine (ADMA+SDMA), N-monomethylarginine, guanidinoacetate, N(1)-acetylspermine, glucose 6-phosphate, Isobar: hexose diphosphates, ribitol, arabonate/xylonate, ribulonate/xylulonate/lyxonate, fructose, galactonate, isocitric lactone, fumarate, malate, 3-hydroxyhexanoate, 5-hydroxyhexanoate, myo-inositol, chiro-inositol glycerophosphoethanolamine, glycerophosphoinositol, 3-hydroxy-3-methylglutarate, Mevalonate, 5-aminoimidazole-4-carboxamide, 2′-AMP, 2′-O-methyladenosine, N6-succinyladenosine, guanosine 2′-monophosphate (2′-GMP), 2′-O-methyluridine, uridine 2′-monophosphate (2′-UMP), 5-methylcytosine, pantoate, pantothenate (Vitamin B5), glucarate (saccharate), hippurate, histidinol, homocitrate, pyrraline, 2-keto-3-deoxy-gluconate, pentose acid, N,N-dimethylalanine, Isobar: hexose diphosphates, 2-methylcitrate, and (3′-5′)-adenylylguanosine.

[0025] The metabolite is secreted by the combination of the first Bacillus amyloliquefaciens strain, the second isolated Bacillus amyloliquefaciens strain, and the first Bacillus subtilis strain.

[0026] In some embodiments, a composition of the invention includes a first isolated Bacillus amyloliquefaciens strain including ELA191024 and a second isolated Bacillus amyloliquefaciens strain including ELA191036. In some embodiments, the composition includes a first isolated Bacillus amyloliquefaciens strain ELA191024 and a second isolated Bacillus amyloliquefaciens strain ELA191036. In some embodiments, the composition includes a first isolated Bacillus amyloliquefaciens strain ELA191024 and a second isolated Bacillus amyloliquefaciens strain ELA202071. In some embodiments, the composition includes a first isolated Bacillus amyloliquefaciens strain ELA191006 and a second isolated Bacillus amyloliquefaciens strain ELA202071.

[0027] In some embodiments, the composition includes a first isolated Bacillus amyloliquefaciens strain including ELA191024 or a second isolated Bacillus amyloliquefaciens strain including ELA191036, and a first isolated Bacillus subtilis strain including ELA191105. In some embodiments, the composition includes a first isolated Bacillus amyloliquefaciens strain including ELA191024 or a second isolated Bacillus amyloliquefaciens strain including ELA191006, and a first isolated Bacillus subtilis strain including ELA191105. In some embodiments, the composition includes a first isolated Bacillus amyloliquefaciens strain ELA191024 or ELA191006, a second isolated Bacillus amyloliquefaciens strain including ELA202071, and a first isolated Bacillus subtilis strain including ELA191105. In some embodiments, the composition includes a first isolated Bacillus amyloliquefaciens strain ELA191024, a second isolated Bacillus amyloliquefaciens strain including ELA202071, and a first isolated Bacillus subtilis strain including ELA191105. In some embodiments, the composition includes a first isolated Bacillus amyloliquefaciens strain ELA191006, a second isolated Bacillus amyloliquefaciens strain including ELA202071, and a first isolated Bacillus subtilis strain including ELA191105.

[0028] In embodiments of the invention, a Bacillus amyloliquefaciens strain ELA191024 corresponding to ATCC deposit PTA-126784 is provided. In an embodiment, Bacillus amyloliquefaciens strain ELA191036 corresponding to ATCC deposit PTA-126785 is provided. In an embodiment, Bacillus amyloliquefaciens strain ELA191006 corresponding to ATCC deposit PTA-127065 is provided. In an embodiment, Bacillus amyloliquefaciens strain ELA202071 corresponding to ATCC deposit PTA-127064 is provided. In an embodiment, Bacillus subtilis strain ELA191105 corresponding to ATCC deposit PTA-126786 is provided.

[0029] In an embodiment of the invention, a probiotic composition or direct feed microbial is provided which comprises a combination of at least two Bacillus strains. In embodiments, the Bacillus strains are selected from ELA191024 or a Bacillus strain having at least 90% identity, 95% identity, 97% identity, 98% identity, 99% identity in genomic sequence to one or more of SEQ ID NO: 1, 2, 3, 4 and 5; ELA191036 or a Bacillus strain having at least 90% identity, 95% identity, 97% identity, 98% identity, 99% identity in genomic sequence to one or more of SEQ ID NO: 6, 7, 8, 9, 10 and 11; ELA191006 or a Bacillus strain having at least 90% identity, 95% identity, 97% identity, 98% identity, 99% identity in genomic sequence to the sequence of SEQ ID NO: 261; ELA202071 or a Bacillus strain having at least 90% identity, 95% identity, 97% identity, 98% identity, 99% identity in genomic sequence to the sequence of SEQ ID NO: 262; and ELA191105 or a Bacillus strain having at least 90% identity, 95% identity, 97% identity, 98% identity, 99% identity in genomic sequence to one or more of SEQ ID NO: 12, 13, 14, 15 and 16.

[0030] In an embodiment of the invention, a probiotic composition or direct feed microbial is provided which comprises a combination of ELA191024, ELA191036 and ELA191105. In an embodiment of the invention, a probiotic composition or direct feed microbial is provided which comprises a combination of ELA191006, ELA191036 and ELA191105. In an embodiment of the invention, a probiotic composition or direct feed microbial is provided which comprises a combination of ELA191006, ELA202071 and ELA191105. In an embodiment of the invention, a probiotic composition or direct feed microbial is provided which comprises a combination of ELA191024, ELA202071 and ELA191105.

[0031] In some embodiments, the invention relates to related, homologous or derivative Bacillus strains having significant genome sequence identity to the genome sequence of any of Bacillus amyloliquefaciens strain ELA191024 corresponding to ATCC deposit PTA-126784, Bacillus amyloliquefaciens strain ELA191036 corresponding to ATCC deposit PTA-126785, Bacillus amyloliquefaciens strain ELA191006 corresponding to ATCC deposit PTA-127065, Bacillus amyloliquefaciens strain ELA202071 corresponding to ATCC deposit PTA-127064, and/or Bacillus subtilis strain ELA191105. Thus, derivative or similar or nearly genetically identical strains to the Bacillus strains provided herein are contemplated by and additional embodiments of the invention. Bacillus strains having 80% identity, 85% identity, 90% identity, 95% identity, 97% identity, 98% identity, 99% identity in genomic sequence to a strain provided and deposited in association with this invention are contemplated and are embodiments of the invention. Such derivative or similar or nearly genetically identical strains must similarly function as probiotics and have activity/capability or function in improving animal health and animal production and performance, including as detailed in the capability and activity or function of the strains and examples hereof. Exemplary of this embodiment, it is noted that Bacillus amyloliquefaciens strain ELA191024 corresponding to ATCC deposit PTA-126784 and Bacillus amyloliquefaciens strain ELA191006 corresponding to ATCC deposit PTA-127065 are genetically related or similar strains, demonstrating 99% identity in genome sequence.

[0032] In embodiments, the Bacillus strains are selected from ELA191024 corresponding to ATCC deposit PTA-126784 or a Bacillus strain having at least 90% identity, 95% identity, 97% identity, 98% identity, 99% identity in genomic sequence to the sequence of ELA191024 corresponding to ATCC deposit PTA-126784; ELA191036 corresponding to ATCC deposit PTA-126785 or a Bacillus strain having at least 90% identity, 95% identity, 97% identity, 98% identity, 99% identity in genomic sequence to the sequence of ELA191036 corresponding to ATCC deposit PTA-126785; ELA191006 corresponding to ATCC deposit PTA-127065 or a Bacillus strain having at least 90% identity, 95% identity, 97% identity, 98% identity, 99% identity in genomic sequence to the sequence of ELA191006 corresponding to ATCC deposit PTA-127065; ELA202071 corresponding to ATCC deposit PTA-127064 or a Bacillus strain having at least 90% identity, 95% identity, 97% identity, 98% identity, 99% identity in genomic sequence to the sequence of ELA202071 corresponding to ATCC deposit PTA-127064; and ELA191105 corresponding to ATCC deposit PTA-126786 or a Bacillus strain having at least 90% identity, 95% identity, 97% identity, 98% identity, 99% identity in genomic sequence to the sequence of ELA191105 corresponding to ATCC deposit PTA-126786.

[0033] In accordance with one embodiment of the invention, a probiotic composition is provided comprising at least one of: a first isolated Bacillus amyloliquefaciens strain, a second isolated Bacillus amyloliquefaciens strain, and a first isolated Bacillus subtilis strain; and a carrier suitable for animal administration; wherein said composition reduces or inhibits the colonization of an animal by a pathogenic bacterium when an effective amount is administered to an animal, as compared to an animal not administered the composition; and wherein the first isolated Bacillus amyloliquefaciens strain comprises a nucleic acid sequence having at least 95%, at least 96%, at least 97%, at least 98%, or at least 99% sequence identity with SEQ ID NO: 59, or wherein the first isolated Bacillus amyloliquefaciens strain comprises a nucleic acid sequence having at least 95%, at least 96%, at least 97%, at least 98%, or at least 99% sequence identity with SEQ ID NO: 261, and/or with nucleic acid encoding one or more protein of SEQ ID NO: 263-276;
[0034] wherein the second Bacillus amyloliquefaciens strain comprises a nucleic acid sequence having at least 95%, at least 96%, at least 97%, at least 98%, or at least 99% sequence identity with SEQ ID NO: 133, or wherein the second Bacillus amyloliquefaciens strain comprises a nucleic acid sequence having at least 95%, at least 96%, at least 97%, at least 98%, or at least 99% sequence identity with SEQ ID NO: 262, and/or with nucleic acid encoding one or more protein of SEQ ID NO: 277-284; wherein the first Bacillus subtilis strain comprises a nucleic acid sequence having at least 95%, at least 96%, at least 97%, at least 98%, or at least 99% sequence identity with SEQ ID NO:257, or with a nucleic acid sequence encoding one or more protein of SEQ ID NO: 285-305.

[0035] In an embodiment, the composition comprises at least two of: the first isolated Bacillus amyloliquefaciens strain, the second isolated Bacillus amyloliquefaciens strain, and the first isolated Bacillus subtilis strain. In an embodiment, the composition comprises the first isolated Bacillus amyloliquefaciens strain, the second isolated Bacillus amyloliquefaciens strain, and the first isolated Bacillus subtilis strain.

[0036] In an embodiment of the composition, the carrier is selected from edible food grade material, mineral mixture, gelatin, cellulose, carbohydrate, starch, glycerin, water, rice hulls, glycol, molasses, calcium carbonate, whey, sucrose, dextrose, soybean oil, vegetable oil, sesame oil, and corn oil.

[0037] In an embodiment, the composition does not comprise Lactobacillus. In an embodiment, the composition does not comprise non-Bacillus strains. In an embodiment, Bacillus amyloliquefaciens and/or Bacillus subtilis are the only bacterial strains in the composition.

[0038] In one embodiment of the composition, the first Bacillus amyloliquefaciens strain comprises at least one of:
[0039] a nucleic acid sequence having at least 95%, at least 96%, at least 97%, at least 98%, or at least 99% sequence identity with SEQ ID NO: 61, 63, 65, 67, 69, 71, or 73, or a nucleic acid sequence having at least 95%, at least 96%, at least 97%, at least 98%, or at least 99% sequence identity with nucleic acid encoding a protein of SEQ ID NO: 263, 264, 265, 266, 267, 268, 269, 270, 271, 272, 273, 274, 275, or 276; and
[0040] wherein the second Bacillus amyloliquefaciens strain comprises at least one of:
[0041] a nucleic acid sequence having at least 95%, at least 96%, at least 97%, at least 98%, or at least 99% sequence identity with SEQ ID NO: 135, 137, 139, 141, 143, 145 or 147, or a nucleic acid sequence having at least 95%, at least 96%, at least 97%, at least 98%, or at least 99% sequence identity with nucleic acid encoding a protein of SEQ ID NO: 277, 278, 279, 280, 281, 282, 283 or 284;
[0042] wherein the first Bacillus subtilis strain comprises at least one of:
[0043] a nucleic acid sequence having at least 95%, at least 96%, at least 97%, at least 98%, or at least 99% sequence identity with SEQ ID NO: 255, 253, 251, 249, 247, 245 or 243, or a nucleic acid sequence having at least 95%, at least 96%, at least 97%, at least 98%, or at least 99% sequence identity with nucleic acid encoding a protein of SEQ ID NO: 285, 286, 287, 288, 289, 290, 291, 292, 293, 294, 295, 296, 297, 298, 299, 300, 301, 302, 303, 304 or 305.

[0044] In an embodiment, a composition is provided, wherein:
[0045] the first isolated Bacillus amyloliquefaciens strain comprises a nucleic acid sequence having at least 95%, at least 96%, at least 97%, at least 98%, or at least 99% sequence identity with at least one of SEQ ID NO: 1, SEQ ID NO: 2, SEQ ID NO: 3, and SEQ ID NO: 4, or wherein the first isolated Bacillus amyloliquefaciens strain comprises a nucleic acid sequence having at least 95%, at least 96%, at least 97%, at least 98%, or at least 99% sequence identity with SEQ ID NO: 261; the second isolated Bacillus amyloliquefaciens strain comprises a nucleic acid sequence having at least 95%, at least 96%, at least 97%, at least 98%, or at least 99% sequence identity with at least one of SEQ ID NO: 6, SEQ ID NO: 7, SEQ ID NO: 8, SEQ ID NO: 9, SEQ ID NO: 10, and SEQ ID NO: 11, or wherein the second isolated Bacillus amyloliquefaciens strain comprises a nucleic acid sequence having at least 95%, at least 96%, at least 97%, at least 98%, or at least 99% sequence identity with SEQ ID NO: 262; and
[0046] the first isolated Bacillus subtilis strain comprises a nucleic acid sequence having at least 95%, at least 96%, at least 97%, at least 98%, or at least 99% sequence identity with at least one of SEQ ID NO: 12, SEQ ID NO: 13, SEQ ID NO: 14, and SEQ ID NO: 15.

[0047] In an embodiment, the first isolated Bacillus amyloliquefaciens strain comprises a nucleic acid sequence having at least 95%, at least 96%, at least 97%, at least 98%, or at least 99% sequence identity with SEQ ID NO: 5. In an embodiment, the first isolated Bacillus amyloliquefaciens strain comprises a nucleic acid sequence having at least 95%, at least 96%, at least 97%, at least 98%, or at least 99% sequence identity with SEQ ID NO: 261. In an embodiment, the second isolated Bacillus amyloliquefaciens strain comprises a nucleic acid sequence having at least 95%, at least 96%, at least 97%, at least 98%, or at least 99% sequence identity with SEQ ID NO: 10 and/or with SEQ ID NO: 11. In an embodiment, the second isolated Bacillus amyloliquefaciens strain comprises a nucleic acid sequence having at least 95%, at least 96%, at least 97%, at least 98%, or at least 99% sequence identity with SEQ ID NO: 262. In an embodiment, the first isolated Bacillus subtilis strain comprises a nucleic acid sequence having at least 95%, at least 96%, at least 97%, at least 98%, or at least 99% sequence identity with SEQ ID NO: 16. In an embodiment, the first isolated Bacillus subtilis strain comprises a nucleic acid sequence having at least 95%, at least 96%, at least 97%, at least 98%, or at least 99% sequence identity with SEQ ID NO: 12, 13, 14, 15 and 16.

[0048] In an embodiment, the composition comprises the first isolated Bacillus amyloliquefaciens strain; and the second isolated Bacillus amyloliquefaciens strain or the first isolated Bacillus subtilis strain. In an embodiment, the composition comprises the first isolated Bacillus amyloliquefaciens strain and the second isolated Bacillus amyloliquefaciens strain.

[0049] In an embodiment of the composition, at least one unique metabolite is secreted by the combination of the first isolated Bacillus amyloliquefaciens strain and the second isolated Bacillus amyloliquefaciens strain, wherein the at least one metabolite is selected from: histidine, N-acetylhistidine, phenyllactate (PLA), 1-carboxyethyltyrosine, 3-(4-hydroxyphenyl)lactate (HPLA), tryptophan, N-acetyltryptophan, anthranilate, indolelactate, isovalerylglycine, N-acetylisoleucine, N-acetylmethionine, urea, ornithine, spermidine, spermine, cysteinylglycine, pyruvate, sucrose, fumarate, deoxycarnitine, 2R,3R-dihydroxybutyrate, chiro-inositol, glycerophosphorylcholine (GPC), 5-aminoimidazole-4-carboxamide, xanthine, AMP, 2′-deoxyadenosine, dihydroorotate, UMP, uridine, CMP, cytidine, (3?-5)-adenylyluridine, (3?-5)-cytidylyladenosine, (3?-5)-cytidylylcytidine, (3′-5′)-cytidylyluridine, (3′-5′)-guanylylcytidine, (3′-(3′-5′)-uridylylcytidine, (3′-5′)-uridylyluridine, (3′-5′)-uridylyladenosine, NAD+, oxalate (ethanedioate), maltol, 1-methylhistidine, N6,N6-dimethyllysine, S-methylcysteine, and 2-methylcitrate.

[0050] In one embodiment, the composition comprises a ratio of the first isolated Bacillus amyloliquefaciens strain and the second isolated Bacillus amyloliquefaciens strain of 0.75-1.5:1. In an embodiment, the composition comprises about equal amounts of the first isolated Bacillus amyloliquefaciens strain and the second isolated Bacillus amyloliquefaciens strain. In an embodiment, the composition comprises the first isolated Bacillus amyloliquefaciens strain, the second isolated Bacillus amyloliquefaciens strain, and the first isolated Bacillus subtilis strain. In an embodiment, the composition comprises the first isolated Bacillus amyloliquefaciens strain, the second isolated Bacillus amyloliquefaciens strain, and the first isolated Bacillus subtilis strain in about equal amounts.

[0051] In an embodiment, the composition comprises a combination of two Bacillus amyloliquefaciens strains and one Bacillus subtilus strain, wherein each strain is present in about equal amounts. In an embodiment, the composition comprises a combination of two Bacillus amyloliquefaciens strains and one Bacillus subtilus strain, wherein each strain is present in equal amounts. In an embodiment, the composition comprises a combination of two Bacillus amyloliquefaciens strains and one Bacillus subtilus strain, wherein the ratio of the strains is 0.75-1.5:1.

[0052] In one embodiment, a composition is provided comprising strain ELA191024, ELA191036 and ELA191105 in equal amounts or at a ratio of 0.75-1.5:1. In one embodiment, a composition is provided comprising strain ELA191006, ELA191036 and ELA191105 in equal amounts or at a ratio of 0.75-1.5:1. In one embodiment, a composition is provided comprising strain ELA1910006, ELA202071 and ELA191105 in equal amounts or at a ratio of 0.75-1.5:1.

[0053] An embodiment of the composition is provided, wherein at least one unique metabolite is secreted by the combination of the first isolated Bacillus amyloliquefaciens strain, the second isolated Bacillus amyloliquefaciens strain, and the first isolated Bacillus subtilis strain; wherein the at least one metabolite is selected from: N-carbamoylserine, beta-citrylglutamate, N6-methyllysine, N6,N6-dimethyllysine, N6,N6,N6-trimethyllysine, saccharopine, cadaverine, N-succinyl-phenylalanine, 2-hydroxyphenylacetate, 3-(4-hydroxyphenyl)lactate (HPLA), N-acetyltryptophan, indolelactate, N-acetylleucine, 4-methyl-2-oxopentanoate, homocitrulline, dimethylarginine (ADMA+SDMA), N-monomethylarginine, guanidinoacetate, N(1)-acetylspermine, glucose 6-phosphate, Isobar: hexose diphosphates, ribitol, arabonate/xylonate, ribulonate/xylulonate/lyxonate, fructose, galactonate, isocitric lactone, fumarate, malate, 3-hydroxyhexanoate, 5-hydroxyhexanoate, myo-inositol, chiro-inositol glycerophosphoethanolamine, glycerophosphoinositol, 3-hydroxy-3-methylglutarate, Mevalonate, 5-aminoimidazole-4-carboxamide, 2′-AMP, 2′-O-methyladenosine, N6-succinyladenosine, guanosine 2′-monophosphate (2′-GMP), 2′-O-methyluridine, uridine 2′-monophosphate (2′-UMP), 5-methylcytosine, pantoate, pantothenate (Vitamin B5), glucarate (saccharate), hippurate, histidinol, homocitrate, pyrraline, 2-keto-3-deoxy-gluconate, pentose acid, N,N-dimethylalanine, Isobar: hexose diphosphates, 2-methylcitrate, and (3′-5′)-adenylylguanosine.

[0054] In one embodiment, the first isolated Bacillus amyloliquefaciens strain comprises strain ELA191024 deposited with ATCC under patent deposit number PTA-126784. In one embodiment, the first isolated Bacillus amyloliquefaciens strain comprises strain ELA191006 deposited with ATCC under patent deposit number PTA-127065. In one embodiment, the second isolated Bacillus amyloliquefaciens strain comprises strain ELA191036 deposited with ATCC under patent deposit number PTA-126785. In one embodiment, the second isolated Bacillus amyloliquefaciens strain comprises strain ELA202071 deposited with ATCC under patent deposit number PTA-127064. In one embodiment, the first isolated Bacillus subtilis strain comprises strain ELA191105 deposited with ATCC under patent deposit number PTA-126786.

[0055] In an embodiment, the composition comprises a ratio of the first isolated Bacillus amyloliquefaciens strain, the second isolated Bacillus amyloliquefaciens strain, and the first isolated Bacillus subtilis strain of 0.75-1.5:1:0.75-1.5. In an embodiment, the composition comprises about equal amounts of the first isolated Bacillus amyloliquefaciens strain, the second isolated Bacillus amyloliquefaciens strain, and the first isolated Bacillus subtilis strain. In an embodiment, the ratio or amount is characterized by the number of viable spores per gram dry weight. In an embodiment, the composition comprises from about 1⁴ to about 1¹⁰ viable spores per gram dry weight.

[0056] In one embodiment, the first isolated Bacillus amyloliquefaciens strain, the second isolated Bacillus amyloliquefaciens strain, and the first isolated Bacillus subtilis strain are isolated from poultry.

[0057] In an embodiment of the invention, the composition is formulated as animal feed, feed additive, food ingredient, water additive, water-mixed additive, consumable solution, consumable spray additive, consumable solid, consumable gel, injection, or combinations thereof. In one embodiment, the composition comprises animal feed.

[0058] In an embodiment of the composition or method of the invention, the animal administered the composition further exhibits at least one improved gut characteristic, as compared to an animal not administered the composition; wherein improved gut characteristics includes at least one of: decreasing pathogen-associated lesion formation in the gastrointestinal tract, increasing feed digestibility, increasing meat quality, increasing egg quality, modulating microbiome, improving short chain fatty acids, improving laying performance, and increasing gut health (reducing permeability and inflammation).

[0059] In an embodiment, the pathogenic bacterium comprises at least one of: Salmonella Typhimurium, Salmonella Infantis, Salmonella Hadar, Salmonella Enteritidis, Salmonella Newport, Salmonella Kentucky, Clostridium perfringens, Staphylococcus aureus, Streptoccus uberis, Streptococcus suis, Escherichia coli, Campylobacter jejuni, Fusobacterium necrophorum, Avian pathogenic Escherichia coli (APEC), Salmonella Lubbock, Trueperella pyogenes, shiga toxin producing E. coli, enterotoxigenic E. coli, Campylobacter coli, and Lawsonia intracellularis.

[0060] In an embodiment, the composition treats, alleviates, or reduces an infection from at least one of: Salmonella Typhimurium, Salmonella Infantis, Salmonella Hadar, Salmonella Enteritidis, Salmonella Newport, Salmonella Kentucky, Clostridium perfringens, Staphylococcus aureus, Streptoccus uberis, Streptococcus suis, Escherichia coli, Campylobacter jejuni, Fusobacterium necrophorum, Avian pathogenic Escherichia coli (APEC), Salmonella Lubbock, Trueperella pyogenes, shiga toxin producing E. coli, enterotoxigenic E. coli, Campylobacter coli, and Lawsonia intracellularis.

[0061] In an embodiment, the composition treats, alleviates, or reduces at least one of: leaky gut syndrome, intestinal inflammation, necrotic enteritis, and coccidiosis.

[0062] In an embodiment of the invention, the animal is human, non-human, poultry (chicken, turkey), bird, cattle, swine, salmon, fish, cat, or dog. In an embodiment the animal is poultry. In an embodiment, the poultry is a chicken. In an embodiment, the poultry is a broiler chicken. In an embodiment, the poultry is an egg-producing chicken (layer).

[0063] In an embodiment, the animal is poultry and wherein the poultry administered the composition further exhibits at least one of: decreased feed conversion ratio, increased weight, increased lean body mass, decreased pathogen-associated lesion formation in the gastrointestinal tract, decreased colonization of pathogens, modulated microbiome, increased egg quality, increased feed digestibility, and decreased mortality rate, as compared to poultry not administered the composition.

[0064] In an embodiment, the feed conversion ratio is decreased by at least 1%, at least 5%, at least 6%, at least 7%, at least 8%, at least 9%, at least 10%, or at least 15%. In an embodiment, poultry weight is increased by at least 1%, at least 5%, at least 10%, at least 15%, at least 25%, or at least 50%. In an embodiment, pathogen-associated lesion formation in the gastrointestinal tract is decreased by at least 1%, at least 5%, at least 10%, at least 15%, at least 25%, or at least 50%. In an embodiment, mortality rate is decreased by at least 1%, at least 5%, at least 10%, at least 15%, at least 25%, or at least 50%.

[0065] In an embodiment, the pathogen comprises at least one of Salmonella spp., Clostridium spp., Campylobacter spp., Staphylococcus spp., Streptococcus spp., E. coli, and Avian Pathogenic E. coli.

[0066] In an embodiment, administered comprises in ovo administration. In an embodiment, administered comprises spray administration. In an embodiment, administered comprises immersion, intranasal, intramammary, topical, or inhalation.

[0067] In an embodiment, administered comprises administration of a vaccine. In an embodiment, the animal is administered a vaccine prior to the administration of the composition. In an embodiment, the animal is poultry and the poultry is administered a vaccine prior to the administration of the composition. In an embodiment, the animal is swine and the swine is administered a vaccine prior to the administration of the composition. In an embodiment, the animal is administered a vaccine concurrently with the administration of the composition. In an embodiment, the animal is poultry and the poultry is administered a vaccine concurrently with the administration of the composition. In an embodiment, the animal is poultry and the poultry is administered a vaccine, wherein said vaccine comprises a vaccine that aids in the prevention of coccidiosis. In an embodiment, the animal is swine and the swine is administered a vaccine concurrently with the administration of the composition.

[0068] In one embodiment, the isolated strains are inactivated. In an embodiment, the isolated strains are not genetically engineered.

[0069] In an embodiment, a composition is provided for use in therapy. In an embodiment, a composition is provided for use in improving animal health. In an embodiment, a composition is provided for use in reducing colonization of an animal by a pathogenic bacterium. In an embodiment, a composition is provided for use in the manufacture of a medicament for reducing colonization of an animal by a pathogenic bacterium.

[0070] In an embodiment, a method is provided for reducing or inhibiting the colonization of an animal by a pathogenic bacterium, the method comprising administering to an animal an effective amount of a composition according to the invention. In an embodiment, a method is provided for reducing or inhibiting the colonization of an animal by a pathogenic bacterium, the method comprising administering to an animal an effective amount of a composition comprising a first isolated Bacillus amyloliquefaciens strain, a second isolated Bacillus amyloliquefaciens strain, and a first isolated Bacillus subtilis strain. In an embodiment, a method is provided for reducing or inhibiting the colonization of an animal by a pathogenic bacterium, the method comprising administering to an animal an effective amount of a composition comprising a first isolated Bacillus amyloliquefaciens strain selected from ELA191024 and ELA191006 or active and effective variants thereof having at least 95%, 97%, 98% or 99% identity to the nucleic acid genome sequence of ELA191024 (SEQ ID NO: 1, 2, 3, 4, 5) or ELA191006 (SEQ ID NO:261), a second isolated Bacillus amyloliquefaciens strain selected from ELA191036 and ELA202071 or active and effective variants thereof having at least 95%, 97%, 98% or 99% identity to the nucleic acid genome sequence of ELA191036 (SEQ ID NO: 16, 7, 8, 9, 10, 11) or ELA202071 (SEQ ID NO:262), and a first isolated Bacillus subtilis strain ELA191105 or active and effective variants thereof having at least 95%, 97%, 98% or 99% identity to the nucleic acid genome sequence of ELA191105 (SEQ ID NO: 12, 13, 14, 15, 16).

[0071] In embodiments of the method, the animal is human, non-human animal, poultry (chicken, turkey), bird, cattle, swine, salmon, fish, cat, or dog. In one embodiment, the animal is poultry. In one embodiment, the animal is swine.

[0072] In an embodiment, the method further comprises improving animal health, and wherein improving animal health comprises at least one of decreasing pathogen-associated lesion formation in the gastrointestinal tract, decreasing colonization of pathogens, and decreasing mortality rate.

[0073] In an embodiment, a method is provided for improving animal health, the method comprising administering to an animal an effective amount of a composition according to the invention. In an embodiment, a method is provided for improving animal health, the method comprising administering to an animal an effective amount of a composition comprising a first isolated Bacillus amyloliquefaciens strain, a second isolated Bacillus amyloliquefaciens strain, and a first isolated Bacillus subtilis strain. In an embodiment, a method is provided for improving animal health, the method comprising administering to an animal an effective amount of a composition comprising a first isolated Bacillus amyloliquefaciens strain selected from ELA191024 and ELA191006 or active and effective variants thereof having at least 95%, 97%, 98% or 99% identity to the nucleic acid genome sequence of ELA191024 (SEQ ID NO: 1, 2, 3, 4, or ELA191006 (SEQ ID NO:261), a second isolated Bacillus amyloliquefaciens strain selected from ELA191036 and ELA202071 or active and effective variants thereof having at least 95%, 97%, 98% or 99% identity to the nucleic acid genome sequence of ELA191036 (SEQ ID NO: 16, 7, 8, 9, 10, 11) or ELA202071 (SEQ ID NO:262), and a first isolated Bacillus subtilis strain ELA191105 or active and effective variants thereof having at least 95%, 97%, 98% or 99% identity to the nucleic acid genome sequence of ELA191105 (SEQ ID NO: 12, 13, 14, 15, 16).

[0074] In an embodiment, a method is provided for treating necrotic enteritis in poultry, wherein said method comprises administering a composition according to the invention as provided herein to a poultry in need thereof. In an embodiment, a method is provided reducing mortality in poultry due to necrotic enteritis, wherein said method comprises administering a composition according to the invention as provided herein to a poultry in need thereof. In an embodiment, a method is provided for improving performance selected from average daily feed intake (ADFI), average daily gain (ADG) and feed conversion ratio (FCR) in poultry, wherein said method comprises administering a composition according to the invention as provided herein to a poultry in need thereof.

[0075] In an embodiment, a method is provided for reducing post-weaning diarrhea in swine, wherein said method comprises administering a composition according to the invention as provided herein to a post-weaning swine in need thereof. In an embodiment, a method is provided for improving feed intake, penn weight and/or weight gain in swine, wherein said method comprises administering a composition according to the invention as provided herein to a post-weaned swine or piglet. In an embodiment, a method is provided for improving performance selected from average daily feed intake (ADFI), average daily gain (ADG) and feed conversion ratio (FCR) inswine, particularly in post-weaning swine, wherein said method comprises administering a composition according to the invention as provided herein to a swine, particularly post-weaning swine, in need thereof.

[0076] In embodiments of the methods, the composition comprises the first isolated Bacillus amyloliquefaciens strain, and the second isolated Bacillus amyloliquefaciens strain. In an embodiment of the methods, the method comprises administering to an animal an effective amount of a composition comprising a first isolated Bacillus amyloliquefaciens strain selected from ELA191024 and ELA191006 or active and effective variants thereof having at least 95%, 97%, 98% or 99% identity to the nucleic acid genome sequence of ELA191024 (SEQ ID NO: 1, 2, 3, 4, 5) or ELA191006 (SEQ ID NO:261), a second isolated Bacillus amyloliquefaciens strain selected from ELA191036 and ELA202071 or active and effective variants thereof having at least 95%, 97%, 98% or 99% identity to the nucleic acid genome sequence of ELA191036 (SEQ ID NO: 16, 7, 8, 9, 10, 11) or ELA202071 (SEQ ID NO:262), and a first isolated Bacillus subtilis strain ELA191105 or active and effective variants thereof having at least 95%, 97%, 98% or 99% identity to the nucleic acid genome sequence of ELA191105 (SEQ ID NO: 12, 13, 14, 15, 16). In an embodiment, equal amounts of the strains are administered or ratios of 0.75-1.5:1 respectively.

[0077] In an embodiment of the method(s), at least one unique metabolite is secreted by the combination of the first isolated Bacillus amyloliquefaciens strain and the second isolated Bacillus amyloliquefaciens strain; wherein the at least one unique metabolite is selected from: histidine, N-acetylhistidine, phenyllactate (PLA), 1-carboxyethyltyrosine, 3-(4-hydroxyphenyl)lactate (HPLA), tryptophan, N-acetyltryptophan, anthranilate, indolelactate, isovalerylglycine, N-acetylisoleucine, N-acetylmethionine, urea, ornithine, spermidine, spermine, cysteinylglycine, pyruvate, sucrose, fumarate, deoxycarnitine, 2R,3R-dihydroxybutyrate, chiro-inositol, glycerophosphorylcholine (GPC), 5-aminoimidazole-4-carboxamide, xanthine, AMP, 2′-deoxyadenosine, dihydroorotate, UMP, uridine, CMP, cytidine, (3?-5)-adenylyluridine, (3?-5)-cytidylyladenosine, (3?-5)-cytidylylcytidine, (3′-5′)-cytidylyluridine, (3′-5′)-guanylylcytidine, (3′-(3′-5′)-uridylylcytidine, (3′-5′)-uridylyluridine, (3′-5′)-uridylyladenosine, NAD+, oxalate (ethanedioate), maltol, 1-methylhistidine, N6,N6-dimethyllysine, S-methylcysteine, and 2-methylcitrate.

[0078] In an embodiment, the composition comprises the first isolated Bacillus amyloliquefaciens strain, the second isolated Bacillus amyloliquefaciens strain, and the first isolated Bacillus subtilis strain. In one such embodiment, at least one unique metabolite is secreted by the combination of the first isolated Bacillus amyloliquefaciens strain, the second isolated Bacillus amyloliquefaciens strain, and the first isolated Bacillus subtilis strain; wherein the at least one metabolite is selected from: N-carbamoylserine, beta-citrylglutamate, N6-methyllysine, N6,N6-dimethyllysine, N6,N6,N6-trimethyllysine, saccharopine, cadaverine, N-succinyl-phenylalanine, 2-hydroxyphenylacetate, 3-(4-hydroxyphenyl)lactate (HPLA), N-acetyltryptophan, indolelactate, N-acetylleucine, 4-methyl-2-oxopentanoate, homocitrulline, dimethylarginine (ADMA+SDMA), N-monomethylarginine, guanidinoacetate, N(1)-acetylspermine, glucose 6-phosphate, Isobar: hexose diphosphates, ribitol, arabonate/xylonate, ribulonate/xylulonate/lyxonate, fructose, galactonate, isocitric lactone, fumarate, malate, 3-hydroxyhexanoate, 5-hydroxyhexanoate, myo-inositol, chiro-inositol glycerophosphoethanolamine, glycerophosphoinositol, 3-hydroxy-3-methylglutarate, Mevalonate, 2′-AMP, 2′-O-methyladenosine, N6-succinyladenosine, guanosine 2′-monophosphate (2′-GMP), 2′-O-methyluridine, uridine 2′-monophosphate (2′-UMP), pantoate, pantothenate (Vitamin B5), glucarate (saccharate), hippurate, histidinol, homocitrate, pyrraline, 2-keto-3-deoxy-gluconate, pentose acid, N,N-dimethylalanine, Isobar: hexose diphosphates, 2-methylcitrate, and (3′-5′)-adenylylguanosine.

[0079] In an embodiment of the method(s), the method does not comprise administration of an antibiotic.

[0080] In a further embodiment, a method is provided of preparing a fermentation product comprising the steps of:
[0081] (a) obtaining at least one bacterial strain selected from a first isolated Bacillus amyloliquefaciens strain comprising SEQ ID NO: 59 or a first isolated Bacillus amyloliquefaciens strain comprising one or more of SEQ ID NO: 263-276, a second isolated Bacillus amyloliquefaciens strain comprising SEQ ID NO: 133 or a second isolated Bacillus amyloliquefaciens strain comprising one or more of SEQ ID NO: 277-284, and a first isolated Bacillus subtilis strain comprising SEQ ID NO: 257 or a first isolated Bacillus subtilis strain comprising one or more of SEQ ID NO: 285-305;
[0082] (b) contacting the at least one strain of step (a) with cell growth media;
[0083] (c) incubating a combination of at least one strain of step (a) and cell growth media of step (b) at a temperature of about 37° C. for an incubation time of about 24 hours; and
[0084] (d) cooling the combination of step (c);
[0085] wherein the product of step (d) comprises the fermentation product.

[0086] In an embodiment, the cell growth media comprises: 0.5 g casamino acids/L, 1% glucose, Disodium Phosphate (anhydrous) 6.78 g/L, Monopotassium Phosphate 3 g/L, Sodium Chloride 0.5 g/L, and Ammonium Chloride 1 g/L.

[0087] In an embodiment, the cell growth media comprises: Peptone 30 g/L; Sucrose 30 g/L; Yeast extract 8 g/L; KH2PO4 4 g/L; MgSO4 1.0 g/L; and MnSO4 25 mg/L.

[0088] In an embodiment, a method is provided of delivering a metabolite to the gut of an animal, said method comprising administering to an animal a composition comprising: a first isolated Bacillus amyloliquefaciens strain comprising SEQ ID NO: 59 or a first isolated Bacillus amyloliquefaciens strain comprising nucleic acid encoding one or more of SEQ ID NO: 263-276, and a second isolated Bacillus amyloliquefaciens strain comprising SEQ ID NO: 133 or a second isolated Bacillus amyloliquefaciens strain comprising nucleic acid encoding one or more of SEQ ID NO: 277-284;
[0089] wherein the metabolite comprises at least one of: histidine, N-acetylhistidine, phenyllactate (PLA), 1-carboxyethyltyrosine, 3-(4-hydroxyphenyl)lactate (HPLA), tryptophan, N-acetyltryptophan, anthranilate, indolelactate, isovalerylglycine, N-acetylisoleucine, N-acetylmethionine, urea, ornithine, spermidine, spermine, cysteinylglycine, pyruvate, sucrose, fumarate, deoxycarnitine, 2R,3R-dihydroxybutyrate, chiro-inositol, glycerophosphorylcholine (GPC), 5-aminoimidazole-4-carboxamide, xanthine, AMP, 2′-deoxyadenosine, dihydroorotate, UMP, uridine, CMP, cytidine, (3?-5)-adenylyluridine, (3′-5′)-cytidylyladenosine, (3′-5′)-cytidylylcytidine, (3′-5′)-cytidylyluridine, (3?-5)-guanylylcytidine, (3′-5′)-guanylyluridine, (3′-5′)-uridylylcytidine, (3?-5)-uridylyluridine, (3?-5)-uridylyladenosine, NAD+, oxalate (ethanedioate), maltol, 1-methylhistidine, N6,N6-dimethyllysine, S-methylcysteine, and 2-methylcitrate.

[0090] In an embodiment, the metabolite is secreted by the combination of the first Bacillus amyloliquefaciens strain and the second isolated Bacillus amyloliquefaciens strain.

[0091] In an embodiment of the method(s), the composition is formulated as animal feed, feed additive, food ingredient, water additive, water-mixed additive, consumable solution, consumable spray additive, consumable solid, consumable gel, injection, or combinations thereof. In an embodiment, the composition comprises animal feed.

[0092] In an embodiment, the composition further comprises a carrier. In one embodiment, the carrier selected from edible food grade material, mineral mixture, gelatin, cellulose, carbohydrate, starch, glycerin, water, rice hulls, glycol, molasses, calcium carbonate, whey, sucrose, dextrose, soybean oil, vegetable oil, sesame oil, and corn oil.

[0093] In one embodiment of the method(s), the first isolated Bacillus amyloliquefaciens strain comprises strain ELA191024 deposited with ATCC under patent deposit number PTA-126784, and the second isolated Bacillus amyloliquefaciens strain comprises strain ELA191036 deposited with ATCC under patent deposit number PTA-126785. In one embodiment of the method(s), the first isolated Bacillus amyloliquefaciens strain comprises strain ELA191006 deposited with ATCC under patent deposit number PTA-127065, and the second isolated Bacillus amyloliquefaciens strain comprises strain ELA202071 deposited with ATCC under patent deposit number PTA-127064. In one embodiment of the method(s), the first isolated Bacillus subtilus strain comprises strain ELA191105 deposited with ATCC under patent deposit number PTA-126786.

[0094] In another embodiment, a method is provided of delivering a metabolite to the gut of an animal, said method comprising administering to an animal a composition comprising: a first isolated Bacillus amyloliquefaciens strain comprising SEQ ID NO: 59 or a first isolated Bacillus amyloliquefaciens strain comprising nucleic acid encoding one or more of SEQ ID NO: 263-276, a second isolated Bacillus amyloliquefaciens strain comprising SEQ ID NO: 133 or a second isolated Bacillus amyloliquefaciens strain comprising nucleic acid encoding one or more of SEQ ID NO: 277-284, and a first isolated Bacillus subtilis strain comprising SEQ ID NO: 257; and a carrier suitable for animal administration;
[0095] wherein metabolite comprises at least one of: N-carbamoylserine, beta-citrylglutamate, N6-methyllysine, N6,N6-dimethyllysine, N6,N6,N6-trimethyllysine, saccharopine, cadaverine, N-succinyl-phenylalanine, 2-hydroxyphenylacetate, 3-(4-hydroxyphenyl)lactate (HPLA), N-acetyltryptophan, indolelactate, N-acetylleucine, 4-methyl-2-oxopentanoate, homocitrulline, dimethylarginine (ADMA+SDMA), N-monomethylarginine, guanidinoacetate, N(1)-acetylspermine, glucose 6-phosphate, Isobar: hexose diphosphates, ribitol, arabonate/xylonate, ribulonate/xylulonate/lyxonate, fructose, galactonate, isocitric lactone, fumarate, malate, 3-hydroxyhexanoate, 5-hydroxyhexanoate, myo-inositol, chiro-inositol glycerophosphoethanolamine, glycerophosphoinositol, 3-hydroxy-3-methylglutarate, Mevalonate, 2′-AMP, 2′-O-methyladenosine, N6-succinyladenosine, guanosine 2′-monophosphate (2′-GMP), 2′-O-methyluridine, uridine 2′-monophosphate (2′-UMP), pantoate, pantothenate (Vitamin B5), glucarate (saccharate), hippurate, histidinol, homocitrate, pyrraline, 2-keto-3-deoxy-gluconate, pentose acid, N,N-dimethylalanine, Isobar: hexose diphosphates, 2-methylcitrate, and (3′-5′)-adenylylguanosine.

[0096] In one embodiment, the composition is formulated as animal feed, feed additive, food ingredient, water additive, water-mixed additive, consumable solution, consumable spray additive, consumable solid, consumable gel, injection, or combinations thereof. In an embodiment, the composition comprises animal feed. In an embodiment, the composition comprises a carrier. In an embodiment, the carrier is selected from edible food grade material, mineral mixture, gelatin, cellulose, carbohydrate, starch, lycerin, water, rice hulls, glycol, molasses, calcium carbonate, whey, sucrose, dextrose, soybean oil, vegetable oil, sesame oil, and corn oil.

[0097] In embodiments of the method(s) hereof, the first isolated Bacillus amyloliquefaciens strain comprises strain ELA191024 deposited with ATCC under patent deposit number PTA-126784 or strain ELA191006 deposited with ATCC under patent deposit number PTA-127065, the second isolated Bacillus amyloliquefaciens strain comprises strain ELA191036 deposited with ATCC under patent deposit number PTA-126785 or ELA202071 deposited with ATCC under patent deposit number PTA-127064, and the first isolated Bacillus subtilis strain comprises strain ELA191105 deposited with ATCC under patent deposit number PTA-126786.

[0098] While there have been described what are presently believed to be the preferred embodiments of the present invention, those skilled in the art will realize that other and further changes and modifications may be made thereto without departing from the spirit of the invention, and it is intended to claim all such modifications and changes as come within the true scope of the invention.

[0099] Other objects and advantages will become apparent to those skilled in the art from a review of the ensuing detailed description, which proceeds with reference to the following illustrative drawings, and the attendant claims.

### BRIEF DESCRIPTION OF THE DRAWINGS

[0100] FIG. 1 depicts antimicrobial effect of Bacillus amyloliquefaciens ELA191024, Bacillus amyloliquefaciens ELA191036, and Bacillus subtilis ELA191105, as evidenced by a clear “halo” surrounding the strains. These strains are active against Gram positive and negative bacteria. Pathogenic bacteria shown include gram-positive pathogen Clostridium perfringes; gram negative pathogens are Escherichia coli and Salmonella Typhimurium. In particular, ELA191024, ELA191036, and ELA191105 demonstrate antimicrobial activity against Clostridium perfringens; ELA191024 and ELA191105 demonstrate activity against Salmonella Typhimurium; ELA191024, ELA191036, and ELA191105 demonstrate activity against Avian pathogenic E. coli (APEC078); and ELA191024 and ELA191036 demonstrate activity against Swine pathogenic E. coli.

[0101] FIG. 2 depicts digestive enzyme activity of Bacillus amyloliquefaciens ELA191024, Bacillus amyloliquefaciens ELA191036, and Bacillus subtilis ELA191105. Amylase assay (left) and Protease assay (right).

[0102] FIG. 3A-3B provides examples of a compatibility test for compatibility of isolated strains. One strain is streaked perpendicular to the other strain. (A) shows compatibility of the two strains tested. (B) shows a clearance zone in the intersection of the strains, suggesting strain incompatibility.

[0103] FIG. 4A-4C depicts the data from in-vivo efficacy study on broiler chickens with strain ELA191024 (Bacillus D24). The following was observed: (A) increase in body weight by 3.5%; (B) increase in production efficiency (European Broiler Index, EBI) by 6.2%; and (C) improvement in feed conversion by 3.3%.

[0104] FIGS. 5A-5B depict metabolic data obtained by principal component analysis (PCA) of three strains of Bacillus that were cultured individually and together. A represents the cell pellet of the culture and B represents the supernatant of the culture. A key to the strains and cultures depicted in FIG. 5 is provided below in Table 1.

TABLE 1

| Sample ID | Key |
|---|---|
| P-BAM24 | Pellet, minimal media, Bacillus #24 |
| P-BAM36 | Pellet, minimal media, Bacillus #36 |
| P-BAM105 | Pellet, minimal media, Bacillus #105 |
| P-BAM24-36 | Pellet, minimal media, Bacillus #24 and #36 cocultured together |
| P-BAM24-36A | Pellet, minimal media, Bacillus #24 and #36 cocultured together with |
| | 100 μl of APEC supernatant |
| P-BAM24-36-105 | Pellet, minimal media, Bacillus #24, #36 and #105 cocultured together |
| S-BAM24 | Supernatant, minimal media, Bacillus #24 |
| S-BAM36 | Supernatant, minimal media, Bacillus #36 |
| S-BAM105 | Supernatant, minimal media, Bacillus #105 |
| S-BAM24-36 | Supernatant, minimal media, Bacillus #24 and #36 cocultured |
| | together |
| S-BAM24-36A | Supernatant, minimal media, Bacillus #24 and #36 cocultured |
| | together with 100 μl of APEC supernatant |
| S-BAM24-36-105 | Supernatant, minimal media, Bacillus #24, #36 and #105 cocultured |
| | together |
| Media2 | Minimal media control |
| P-BAR24 | Pellet, rich media, Bacillus #24 |
| P-BAR36 | Pellet, rich media, Bacillus #36 |
| P-BAR105 | Pellet, rich media, Bacillus #105 |
| P-BAR24-36 | Pellet, rich media, Bacillus #24 and #36 cocultured together |
| P-BAR24-36A | Pellet, rich media, Bacillus #24 and #36 cocultured together with |
| | 100 μl of APEC supernatant |
| P-BAR24-36-105 | Pellet, rich media, Bacillus #24, #36 and #105 cocultured together |

“P” indicates pellet, “S” indicates supernatant, BA indicates Bacillus, 24 indicates Bacillus amyloliquefaciens strain ELA191024, 36 indicates Bacillus amyloliquefaciens strain ELA191036, and 105 indicates Bacillus subtilis strain ELA191105. “M” indicates minimal media and “R” indicates rich media.

[0105] FIG. 6A and B depicts global untargeted metabolomic analysis of strains ELA191024 (Ba PTA84), ELA191036 (Ba PTA85), and ELA191105 (Bs PTA86). A. Number of identified secreted metabolites in culture supernatants in two different media. Secreted metabolites were defined as having a scaled intensity at least 1.5-fold higher than observed in media controls. Unique metabolites represent secreted compounds with abundances at least 1.5-fold higher than observed for other single strains (in the case of individual strain cultures) or corresponding individual strains (in the case of co-cultures). B. Pathway representation of metabolites secreted by strains or strain combinations under minimal and rich media culture conditions.

[0106] Number of unique metabolites in different Bacillus samples. The bar on the left of each paired set bars indicates supernatant; and the bar on the right of each paired set of bars indicates cell pellet.

[0107] FIG. 7 provides a diagram of the facility where the Bacillus probiotic blends study in broiler chickens was conducted.

[0108] FIG. 8A-8C depicts (A) final body weight, (B) feed conversion and (C) survival of unchallenged animals is, where it is noted that one outlier pen (circled) was removed from the T01 unchallenged control due to inordinate outlier results across all three measures. The Diet is noted on the x (lower) axis of each chart: Basal (T01), BMD (T03), Combo 1 (T05), Combo 2 (T07), Combo 3 (T09) and Combo 4 (T11).

[0109] FIG. 9A-9C depicts weight gain in unchallenged chickens. (A) depicts average daily gain, (B) depicts mortality-adjusted average daily gain (ADG), and (C) charts the results, with better % vs basal indicated by a color coding (blue being better). The Diet is noted on the x (lower) axis of each chart: Basal (T01), BMD (T03), Combo 1 (T05), Combo 2 (T07), Combo 3 (T09) and Combo 4 (T11).

[0110] FIG. 10A-10C depicts feed intake in unchallenged chickens. (A) depicts average daily feed intake, (B) depicts mortality-adjusted average daily average daily feed intake (ADFI) and (C) charts the results, with better % vs basal indicated by a color coding (blue being better). The Diet is noted on the lower axis of each chart: Basal (T01), BMD (T03), Combo 1 (T05), Combo 2 (T07), Combo 3 (T09) and Combo 4 (T11).

[0111] FIG. 11A-11C depicts feed efficiency in unchallenged chickens. (A) depicts feed conversion ratio, (B) depicts mortality-adjusted feed conversion ratio (FCR) and (C) charts the results, with better % vs basal indicated by a color coding (blue being better). The Diet is noted on the lower axis of each A and B chart: Basal (T01), BMD (T03), Combo 1 (T05), Combo 2 (T07), Combo 3 (T09) and Combo 4 (T11).

[0112] FIG. 12A-12C depicts production efficiency and mortality in unchallenged chickens. (A) depicts the European Broiler Index, (B) depicts mortality results, and (C) charts the results, with better % vs basal indicated by a color coding (blue being better). The Diet is noted on the lower axis of each A and B chart: Basal (T01), BMD (T03), Combo 1 (T05), Combo 2 (T07), Combo 3 (T09) and Combo 4 (T11).

[0113] FIG. 13A-13D depicts necrotic enteritis (NE) lesion scores as assessed on Day 19 of the study, two days post challenge with C. perfringes on Day 17. Scores 0, 1, 2, 3 and 4 are in accordance with the observed macroscopic finding as detailed in Table 22. (A) depicts the percentage of each of the scores 0-4 for each of the diets/combos. (B) depicts the average scores. (C) provides the percentage (%) of animals with scores 3 or greater (3+). The results are charted in (D) with better % vs basal indicated by a color coding (blue being better). The Diet is noted on the lower axis of each A, B and C chart: Basal (T02), BMD (T04), Combo 1 (T06), Combo 2 (T08), Combo 3 (T10) and Combo 4 (T12). P value vs Basal are provided as: *<0.1, **<0.01 and ***<0.001.

[0114] FIG. 14A-14C provides weight gain with NE challenge, particularly average daily gain and mortality-adjusted average daily gain (ADG). (A) depicts average daily gain, (B) depicts mortality-adjusted average daily gain (ADG), and (C) charts the results, with better % vs basal indicated by a color coding (blue being better). The Diet is noted on the lower axis of each A and B chart: Basal (T02), BMD (T04), Combo 1 (T06), Combo 2 (T08), Combo 3 (T10) and Combo 4 (T12). P value vs Basal are provided as: *<0.1, **<0.01 and ***<0.001.

[0115] FIG. 15A-15C provides feed intake with NE challenge, particularly average daily feed intake and mortality-adjusted average daily feed intake (ADFI). (A) depicts average daily feed intake, (B) depicts mortality-adjusted average daily feed intake (ADFI), and (C) charts the results, with better % vs basal indicated by a color coding (blue being better). The Diet is noted on the lower axis of each A and B chart: Basal (T02), BMD (T04), Combo 1 (T06), Combo 2 (T08), Combo 3 (T10) and Combo 4 (T12). P value vs Basal are provided as: *<0.1, **<0.01 and ***<0.001.

[0116] FIG. 16A-16C depicts feed efficiency with NE challenge, particularly feed conversion ratio and mortality-adjusted feed conversion ratio (FCR). (A) depicts feed conversion ratio, (B) depicts mortality-adjusted feed conversion ratio (FCR), and (C) charts the results, with better % vs basal indicated by a color coding (blue being better). The Diet is noted on the lower axis of each A and B chart: Basal (T02), BMD (T04), Combo 1 (T06), Combo 2 (T08), Combo 3 (T10) and Combo 4 (T12), P value vs Basal are provided as: *<0.1, **<0.01 and ***<0.001.

[0117] FIG. 17A-17C depicts production efficiency and mortality with NE challenge, particularly European Broiler Index (EBI) and necrotic enteritis (NE) mortality. (A) depicts European Broiler Index (EBI), (B) depicts NE mortality, and (C) charts the results, with better % vs basal indicated by a color coding (blue being better, red being worse). The Diet is noted on the lower axis of each A and B chart: Basal (T02), BMD (T04), Combo 1 (T06), Combo 2 (T08), Combo 3 (T10) and Combo 4 (T12).

[0118] FIG. 18 provides a chart of pen weight uniformity with the left side of the chart results being with NE challenge and the right side of the chart results being unchallenged. The Diet is noted on the lower axis of We chart: Basal (T02), BMD (T04), Combo 1 (T06), Combo 2 (T06), Combo 3 (T10) and Combo 4 (T12),

[0119] FIG. 19 provides an overall data result comparison of Combo 3 (strains BSUB19105+BAMY20071+BAMY19024) versus BMD and the % difference versus control (Ctrl) which is Basal diet. The results are charted, with better % vs basal indicated by a color coding (blue being better, red being worse).

[0120] FIG. 20 provides a diagram of the facility where the Bacillus probiotic blends study in domestic pigs was conducted.

[0121] FIG. 21A-21B depicts (A) a graph of fecal scores over the course in days of the study, using a 1 (none) to 5 (severe) scoring system, determined for various treatments and doses, and (B) a chart of the overall average fecal score. Comparisons of each of the following were assessed: T01 (control—no antibiotic), T02 (conventional—Tylan antibiotic), T08 (BSUB20025+BSUB19105+BAMY19006), T09 (BSUB19105+BAMY19006+BAMY20071), T10 (BSUB20025+BAMY20071), T11 (BSUB20025+BSUB19105) and T12 (BSUB19105+BAMY19006). Fecal scoring was as follows: 1=None (normal feces), 2=Minimal (slightly soft feces), 3=Mild (soft, partially formed feces), 4=Moderate (loose, semi-liquid feces), 5=Seever (watery, mucous-like feces).

[0122] FIG. 22A-22D depicts pen performance evaluated for several parameters. (A) provides average daily gain (ADG) (B) provides average daily feed intake (ADFI), (C) provides Gain:Feed (GF). (D) charts the final body weight (BW), ADG, ADFI and Gain:Feed ratio versus control, with better % vs control (which is set at 0%) indicated by a color coding (blue being better, red being worse). Comparisons of each of the following were assessed: T01 (control—no antibiotic), T02 (conventional—Tylan antibiotic), T08 (BSUB20025+BSUB19105+BAMY19006 or 25+105+6), T09 (BSUB19105+BAMY19006+BAMY20071 or 105+6+71), T10 (BSUB20025+BAMY20071 or 25+71), T11 (BSUB20025+BSUB19105 or 25+105) and T12 (BSUB19105+BAMY19006 or 105+6).

[0123] FIG. 23A-23D depicts individual performance evaluated for several parameters. (A) provides average daily gain (ADG) (B) provides average daily feed intake (ADFI), (C) provides Gain:Feed (GF). (D) charts the final body weight (BW), ADG, ADFI and Gain:Feed ratio versus control (which is set at 0%), with better % vs control indicated by a color coding (blue being better, red being worse). Comparisons of each of the following were assessed: T01 (control—no antibiotic), T02 (conventional—Tylan antibiotic), T08 (BSUB20025+BSUB19105+BAMY19006 or T09 (BSUB19105+BAMY19006+BAMY20071 or 105+6+71), T10 (BSUB20025+BAMY20071 or 25+71), T11 (BSUB20025+BSUB19105 or 25+105) and T12 (BSUB19105+BAMY19006 or 105+6).

[0124] FIG. 24A-24B provides analysis of various parameters on the basis of the size of the animals (piglets). (A) graphs average daily gain (ADG) for two body weight categories of Phase 1 (Ph1) body weight: 4-5.67 kg and 5.67-7.91 kg. (B) provides a chart of analysis of parameters, particularly Phase 3 (Ph3) body weight, average daily feed intake (ADFI), average daily gain (ADG) and grain:feed (GF) in smaller piglets (3.9-5.7 kg body weight) (top panels) and in larger piglets (5.7-7.9 kg) (bottom panels) versus control (which is set at 0%), with better % vs control indicated by a color coding (blue being better, red being worse). Comparisons of each of the following were assessed: T01 (control—no antibiotic), T02 (conventional—Tylan antibiotic), T08 (BSUB20025+BSUB19105+BAMY19006 or 25+105+6), T09 (BSUB19105+BAMY19006+BAMY20071 or 105+6+71), T10 (BSUB20025+BAMY20071 or 25+71), T11 (BSUB20025+BSUB19105 or 25+105) and T12 (BSUB19105+BAMY19006 or 105+6).

[0125] FIG. 25A-25B depicts average daily gain (ADG) for various piglet sizes. (A) graphs ADG for piglets in body weight ranges of 4-5.32 kg (first set), 5.32-6.13 kg (middle set) and 6.13-7.91 kg (right set). Comparisons of each of the following were assessed: T01 (control—no antibiotic), T02 (conventional—Tylan antibiotic), T08 (BSUB20025+BSUB19105+BAMY19006 or 25+105+6), T09 (BSUB19105+BAMY19006+BAMY20071 or 105+6+71), T10 (BSUB20025+BAMY20071 or 25+71), T11 (BSUB20025+BSUB19105 or 25+105) and T12 (BSUB19105+BAMY19006 or 105+6). (B) provides a chart comparison of ADG for small, medium and large piglets according to body weight and compares conventional (cony), 105+6 (T12; BSUB19105+BAMY19006) and 105+6+71 (T09; (BSUB19105+BAMY19006+BAMY20071).

[0126] FIG. 26 provides a graph of a separate additional study of average daily gain (ADG) for two body weight categories of Phase 1 (Ph1) body weight: 4.33-6.26 kg and 6.26-8.88 kg. Treatments compared for each body weight group of animals are T01 (control—no antibiotic), T02 (conventional—Tylan antibiotic), T08 (B. amyloliquefaciens #24; strain ELA191024), T09 (B. amyloliquefaciens #64), T10 (B. subtilis #105; strain BSUB19105 or ELA191105), T11 (B. subtilis #25; strain BSUB20025) and T12 (B. subtilis #66). In body weight category 4.33-6.26 kg ADG was increased +18 to +29%, while in body weight category 6.26-8.88 kg ADG was altered −18 to +4%.

[0127] FIG. 27 provides details of the dose titration evaluation of the B. subtilis plus B. amyloliquefaciens strain combination 105+6+71. Phase 1 represents days 0 to 7, Phase 2 represents days 7 to 21 and Phase 3 represents days 21 to 42. Control animals T01 were without antibiotic or pharmacological levels of Zn and T02 animals were administered Zn from ZnO. In testing T03 through T08, total doses (CFU/g) of Blend A (alternative bacteria) or of Blend B (strains 105+6+71) of either 75K (75,000), 150 K (150,000) or 300 K (300,000) were administered.

[0128] FIG. 28 depicts pen performance days 0 to 21 evaluated for several parameters. (A) upper and lower panels provide average daily feed intake (ADFI) (g), (B) upper and lower panels provide average daily gain (ADG) (g), (C) upper and lower panels provide Gain:Feed (GF). Control, ZnO, Blend A and Blend B (strains 105+6+71). The Blends were assessed with administration of 75, 150 and 300 K CFU/g.

[0129] FIG. 29 depicts comparison of optimal doses days 0-21. The Blend B dose of 75K CFU/g was compared directly with the higher optimal dose of 150 K of Blend A. (A) provides average daily feed intake (ADFI) for the pen, (B) provides average daily gain (ADG) for the pen in grams (g), (C) depicts gain:feed for the pen, (D) provides a comparison of the ADG for the pigs and (E) shows a quantitative comparison of the results.

[0130] FIG. 30 depicts bodyweight uniformity at Day 21. Blend B and Blend A at each of 150 K and 300 K doses are assessed versus Control and ZnO feed administration. The percentage (%) of pigs with bodyweight within 15% of pen average is provided in (A). (B) provides a tabulation of the quantitative comparison.

[0131] FIG. 31 provides a comparison of the dose response in poultry and swine. Response in swine (d0-21) and Poultry (NE challenge, d0-42) to doses of the Bacillus strain blend 105+6+71 75K, 100 K, 150 K, 200 K, 300 K 400 K and 600 K are depicted.

[0132] FIG. 32 depicts evaluation of the compatibility of the strains B. subtilis 105 (BSUB19105), B. amyloliquefaciens 6 (BAMY19006), B. amyloliquefaciens 24 (strain ELA191024) and B. amyloliquefaciens 71 (BAMY20071). Combinations of two of each of the strains (strains indicated and labeled respectively 24 and 105, 6 and 71, 24 and 71, 71 and 105 and 6 and 105) were assessed wherein one strain is streaked perpendicular to the other strain. The absence of a clearance zone at the intersection of each strain combination tested shows that all of the strains are compatible. Each of strains B. subtilis 105 (BSUB19105), B. amyloliquefaciens 6 (BAMY19006) and B. amyloliquefaciens 71 (BAMY20071) are compatible with one another.

[0133] FIG. 33 provides results of the evaluation of fecal E. maxima oocyts counts on day 23 in an in vivo poultry evaluation. Unchallenged, control, BMD, and strains blend 105+6+71 at doses of 100 K, 200 K, 400 K and 600 K are compared. (A) graphs oocytes per gram of feces. P value vs control is indicated: *<0.1, ** p<0.01 and *** p<0.001. (B) provides a spearman correlation evaluation result.

[0134] FIG. 34 provides evaluation of necrotic enteritis mortalities at days 22-27, comparing Unchallenged, control, BMD, and strains blend 105+6+71 at doses of 50 K, 100 K, 200 K, 400 K and 600 K. (A) depicts the number of mortalities, (B) provides the % mortality and (C) provides a spearman correlation result of % mortality.

[0135] FIG. 35 depicts correlation of oocyte counts with NE mortality. Unchallenged, control, BMD, and strains blend 105+6+71 at doses of 50 K, 100 K, 200 K, 400 K and 600 K are evaluated and the results of spearman correlation assessment depicted in (A) and (B).

[0136] FIG. 36 provides further assessments of the efficacy of the Bacillus 105+6+71 strain combination at a dose of 100 K CFU/g in poultry. Unchallenged, control, BMD, and strains blend 105+6+71 at 100 K dose are evaluated. (A) depicts % mortality, (B) depicts feed conversion ratio (FCR), (C) depicts mortality adjusted FCR, (D) provides European Broiler Index (EBI) and (E) tabulates a comparison of the results.

[0137] FIG. 37 shows evaluation of unadjusted performance in poultry. Unchallenged, control, BMD, and strains blend 105+6+71 at doses of 50 K, 100 K, 200 K, 400 K and 600 K were evaluated (A) provides ADFI (average daily feed intake), (B) shows ADG (average daily gain) and (C) depicts FCR (feed conversion ratio).

[0138] FIG. 38 depicts mortality adjusted performance and compares unchallenged, control, BMD, and strains blend 105+6+71 at doses of 50 K, 100 K, 200 K, 400 K and 600 K. (A) shows MA-ADFI (average daily feed intake), (B) provides MA-ADG (average daily gain) and (C) depicts MA-FCR (feed conversion ratio).

[0139] FIG. 39 shows evaluation of unchallenged, control, BMD administered, and the Bacillus 105+6+71 combination at doses 50 K, 100 K, 200 K, 400 K and 600 K for total production (A) Total Live Weight and (B) EBI (European Broiler Index).

[0140] FIG. 40 shows assessment of unadjusted performance for unchallenged, control, BMD administered, and the Bacillus 105+6+71 combination at doses 50 K, 100 K, 200 K, 400 K and 600 K. (A) depicts % mortality, (B) shows ADFI, (C) provides ADG and (D) shows feed conversion ratio (FCR).

[0141] FIG. 41 provides mortality adjusted performance for unchallenged, control, BMD administered, and the Bacillus 105+6+71 combination at doses 50 K, 100 K, 200 K, 400 K and 600 K. (A) provides % mortality, (B) shows MA-ADFI, (C) provides MA-ADG and (D) depicts MA-FCR.

[0142] FIG. 42 provides assessment of feed efficiency dose response in poultry at Bacillus strain 105+6+71 doses of 50 K, 100 K, 200 K, 400 K and 600 K. (A) provides FCR, (B) provides MA-FCR and (C) shows EBI.

[0143] FIG. 43 provides safety assessment of Bacillus spp. DFM candidates. A. Antimicrobial susceptibility tests of Bacillus spp. MIC (μg/mL) values for each antibiotic tested of respective Bacillus spp. were shown. Nine medically important antibiotics at a concentration range of 0.06-32 μg/mL were tested and the respective antimicrobial susceptibility cut-off concentrations required for Bacillus spp. were shown at the top panel. B. Cytotoxicity assessment of Bacillus spp. culture supernatant toward Vero cells. Culture supernatant of B. cereus ATCC 14579 and B. licheniformis ATCC14580 were used as positive and negative controls, respectively. Cytotoxicity level above 20%, dashed line, is considered cytotoxic.

[0144] FIG. 44 depicts effect of in-feed administration of Ba PTA-84 (strain ELA191024 or strain 24) on growth performance of broiler chicken. Growth performance as measured by four parameters, A. weight gain, B. feed intake, C. Feed Conversion Ratio (FCR), and D. European Broiler Index (EBI).

[0145] FIG. 45 provides microbiome analysis of cecal content from birds fed with or without Ba PTA84. A. Amplicon Sequence Variants (ASV) richness in the cecum of control birds and birds treated with Ba PTA84 (strain ELA191024 or strain 24). Richness is quantified using the Chao index (Mann Whitney U p-value=0.07). B. ASV diversity quantified with the Simpson (left) and Shannon indexes (right) for control birds and birds treated with Ba PTA84. (p-value=0.44, 0.36). C. Principal component analysis of the Bray-Curtis dissimilarity matrix between microbiome profiles for control birds and birds fed with Ba PTA84. Each dot represents a cecal sample. Numbers in parentheses indicate the variance explained by each principal component.

### DETAILED DESCRIPTION

[0146] In an embodiment, the disclosure provides for a composition having one or more of an isolated Bacillus amyloliquefaciens and an isolated Bacillus subtilis strain, wherein the composition includes a carrier that is suitable for animal consumption or use.

[0147] In an embodiment, a composition is provided comprising a combination of Bacillus strains. In an embodiment, the combination provides at least two or two or more Bacillus strains which are compatible but do not naturally occur together and/or are not naturally present in combination in a host or animal. In an embodiment, a composition is provided comprising at least one isolated Bacillus amyloliquefaciens strain and one Bacillus subtilis strain. In an embodiment, a composition is provided comprising two distinct isolated Bacillus amyloliquefaciens strains and one Bacillus subtilis strain. In an embodiment, a composition is provided comprising a first isolated Bacillus amyloliquefaciens strain, a second isolated Bacillus amyloliquefaciens strain, and a Bacillus subtilis strain. In an embodiment, a composition is provided comprising a first isolated Bacillus amyloliquefaciens strain, a second isolated Bacillus amyloliquefaciens strain, and one or more Bacillus subtilis strain.

[0148] In an embodiment the composition disclosed herein includes two different isolated Bacillus amyloliquefaciens strains or one isolated Bacillus amyloliquefaciens strain, and one Bacillus subtilis strain, wherein the composition includes a carrier that is suitable for animal consumption or use. By way of example, the composition may include a first isolated Bacillus amyloliquefacien strain and a second isolated Bacillus amyloliquefacien strain. By way of further example, the composition may include a first isolated Bacillus amyloliquefacien strain or a second isolated Bacillus amyloliquefacien strain, and a first isolated Bacillus subtilis strain.

[0149] A first isolated Bacillus amyloliquefaciens according to the disclosure may be B. amyloliquefaciens strain ELA191024 and may be a strain which includes at least one sequence selected from SEQ ID NO: 1-4, 40-42, 47-48, 51-52, 55-56, and 58-132.

[0150] The first isolated Bacillus amyloliquefaciens strain secretes at least one metabolite selected from glutamine, anthranilate, methionine sulfone, 2-hydroxybutyrate/2-hydroxyisobutyrate, gamma-glutamylphenylalanine, gamma-glutamyltyrosine, azelate (C9-DC), 5-aminoimidazole-4-carboxamide, AMP, adenosine-2′,3′-cyclic monophosphate, adenosine, adenine, uridine-2′,3′-cyclic monophosphate, cytidine 2′,3′-cyclic monophosphate, (3′-5′)-uridylyladenosine, nicotinamide ribonucleotide (NMN), 1-kestose, homocysteine, N-acetylcitrulline, alpha-ketoglutarate, succinate, 5-hydroxyhexanoate, inositol 1-phosphate (DP), N6-methyladenosine, 2′-O-methyladenosine, Guanine, nicotinamide ribonucleotide (NMN),3-dehydroshikimate, 4-hydroxybenzyl alcohol, and quinate.

[0151] An exemplary first isolated Bacillus amyloliquefaciens strain includes strain ELA191024, wherein the strain includes a genome having SEQ ID NO: 5. The first isolated Bacillus amyloliquefaciens strain may be a strain with a nucleic acid sequence having at least 95%, at least 96%, at least 97%, at least 98%, or at least 99% sequence identity with SEQ ID NO: 1, 2, 3, 4 and/or

[0152] A first isolated Bacillus amyloliquefaciens according to the disclosure may be B. amyloliquefaciens strain ELA191006 and may be a strain which includes at least one sequence selected from a nucleic acid sequence encoding one or more protein of SEQ ID NO: 263-276. The first isolated Bacillus amyloliquefaciens strain includes a nucleic acid sequence having at least 95%, at least 96%, at least 97%, at least 98%, or at least 99% sequence identity with SEQ ID NO: 261. The first isolated Bacillus amyloliquefaciens strain includes a nucleic acid sequence having least 95%, at least 96%, at least 97%, at least 98%, or at least 99% sequence identity with at least one of a nucleic acid sequence encoding a polypeptide or amino acid sequence SEQ ID NO: 263, 264, 265, 266, 267, 268, 269, 270, 271, 272, 273, 274, 275 and 276.

[0153] A second isolated Bacillus amyloliquefaciens strain of the present disclosure may be B. amyloliquefaciens strain ELA191036 and may be a strain which includes at least one sequence selected from SEQ ID NO: 6-11 and 133-206. The second isolated Bacillus amyloliquefaciens strain may be a strain with a nucleic acid sequence having at least 95%, at least 96%, at least 97%, at least 98%, or at least 99% sequence identity with SEQ ID NO: 6, 7, 8, 9, 10 and/or 11.

[0154] The second isolated Bacillus amyloliquefaciens strain secretes at least one metabolite selected from 2-methylserine, N-acetylaspartate (NAA), N-acetylasparagine, N-acetylglutamate, N-acetylglutamine, 2-pyrrolidinone, S-1-pyrroline-5-carboxylate, trans-urocanate, cis-urocanate, formiminoglutamate, 4-imidazoleacetate, N6-acetyllysine, N-acetylphenylalanine, Phenylpyruvate, phenethylamine, N-acetyltyrosine, tyramine, 4-hydroxyphenylpyruvate, 3-methoxytyramine, 5-hydroxymethyl-2-furoic acid, N-acetylleucine, isovalerate (C5), N-acetylisoleucine, 3-methyl-2-oxovalerate, 2-hydroxy-3-methylvalerate, methylsuccinate, N-acetylvaline, 3-methyl-2-oxobutyrate, N-acetylmethionine, N-acetylmethionine sulfoxide, S-adenosylmethionine (SAM), homocystine, N-acetylarginine, N-acetylcitrulline, N-acetylproline, N-alpha-acetylornithine, hydroxyproline, Acetylagmatine, spermidine, (N(1)+N(8))-acetylspermidine, Spermine, 5-methylthioadenosine (MTA), 4-acetamidobutanoate, 3-phosphoglycerate, phosphoenolpyruvate (PEP), sedoheptulose-7-phosphate, sedoheptulose, sucrose, glucoronate, N-acetyl-glucosamine 1-phosphate, N-acetylglucosamine/N-acetylgalactosamine, citraconate/glutaconate, butyrate/isobutyrate (4:0), 2-hydroxyglutarate, 5-dodecenoylcarnitine (C12:1), 3-hydroxyoctanoate, 5-hydroxyhexanoate, 1-stearoyl-GPE (18:0), glycerol 3-phosphate, Xanthine, xanthosine, 1-methyladenine, N6-methyladenosine, Guanosine, 7-methylguanine, N-carbamoylaspartate, Orotidine, pseudouridine, 5,6-dihydrouridine, 5-5 methylcytidine, thymine, Nicotinate, nicotinate ribonucleoside, pantothenate (Vitamin B5), pterin, benzoate, 3-dehydroshikimate, 2-isopropylmalate, 4-hydroxybenzyl alcohol, 2,4-di-tert-butylphenol, 1-linoleoylglycerol (18:2), guanosine 3′-monophosphate (3′-GMP), guanosine-2′,3′-cyclic monophosphate, and cytidine 2′,3′-cyclic monophosphate.

[0155] An exemplary second isolated Bacillus amyloliquefaciens strain includes strain ELA191036, wherein the strain includes a genome having SEQ ID NO: 10 and 11. The second isolated Bacillus amyloliquefaciens strain may be a strain with a nucleic acid sequence having at least 95%, at least 96%, at least 97%, at least 98%, or at least 99% sequence identity with SEQ ID NO: 6, 7, 8, 9, 10 and/or 11.

[0156] A second isolated Bacillus amyloliquefaciens according to the disclosure may be B. amyloliquefaciens strain ELA202071 and may be a strain which includes at least one sequence selected from a nucleic acid sequence encoding one or more protein of SEQ ID NO: 277-284. The second isolated Bacillus amyloliquefaciens strain includes a nucleic acid sequence having at least 95%, at least 96%, at least 97%, at least 98%, or at least 99% sequence identity with SEQ ID NO: 262. The second isolated Bacillus amyloliquefaciens strain includes a nucleic acid sequence having least 95%, at least 96%, at least 97%, at least 98%, or at least 99% sequence identity with at least one of a nucleic acid sequence encoding a polypeptide or amino acid sequence SEQ ID NO: 277, 278, 279, 280, 281, 282, 283 or 284.

[0157] The first isolated Bacillus subtilis strain of the present disclosure may be ELA191105 and comprises at least one sequence selected from SEQ ID NO: 12-15 and 207-258. An exemplary first isolated Bacillus subtilis strain includes strain ELA191105, wherein the strain includes a genome having SEQ ID NO: 16. The first isolated Bacillus subtilis strain includes a nucleic acid sequence having at least 95%, at least 96%, at least 97%, at least 98%, or at least 99% sequence identity with SEQ ID NO: 12, 13, 14, 15 and/or 16. The first isolated Bacillus subtilis strain includes a nucleic acid sequence having least 95%, at least 96%, at least 97%, at least 98%, or at least 99% sequence identity with at least one of a nucleic acid sequence encoding a polypeptide or amino acid sequence SEQ ID NO: 285, 286, 287, 288, 289, 290, 291, 292, 293, 294, 295, 296, 297, 298, 299, 300, 301, 302, 303, 304 or 305.

[0158] The first isolated Bacillus subtilis strain secretes at least one metabolite selected from: Betaine, carboxyethyl-GABA, 3-methylhistidine, Saccharopine, pipecolate, N,N-dimethyl-5-aminovalerate, N-butyryl-phenylalanine, Tryptophan, N-butyryl-leucine, 2-hydroxy-4-(methylthio)butanoic acid, S-methylcysteine, Ornithine, N-methylproline, N,N,N-trimethyl-alanylproline betaine (TMAP), N-monomethylarginine, Guanidinoacetate, putrescine, Cysteinylglycine, cyclo(gly-phe), Tryptophylglycine, pyruvate, Mannose, N-acetylmuramate, eicosenamide (20:1), Deoxycarnitine, 2S,3R-dihydroxybutyrate, chiro-inositol, choline, glycerophosphorylcholine (GPC), 1-palmitoyl-GPE (16:0), 1-linoleoylglycerol (18:2), 3-hydroxy-3-methylglutarate, 3-ureidopropionate, (3′-5′)-uridylyluridine, nicotinamide riboside, trigonelline (N′-methylnicotinate), oxalate (ethanedioate), pyridoxine (Vitamin B6), maltol, histidine betaine (hercynine), 2,6-dihydroxybenzoic acid, pentose acid, N-acetylserine, N-acetylthreonine, N-acetylglutamine, 1-methylhistidine, N-acetylhistidine, trans-urocanate, N6-acetyllysine, N-acetyl-cadaverine, N-acetylphenylalanine, phenyllactate (PLA), 3-(4-hydroxyphenyl)lactate (HPLA), isovalerate (C5), N-acetylisoleucine, N-acetylvaline, N-acetylmethionine, S-adenosylmethionine (SAM), 2-hydroxy-4-(methylthio)butanoic acid, S-methylcysteine, N-acetylarginine, Acetylagmatine, glutathione, oxidized (GSSG), 2-hydroxybutyrate/2-hydroxyisobutyrate, gamma-glutamylhistidine, glucoronate, aconitate [cis or trans], 2-methylcitrate, 2R,3R-dihydroxybutyrate, 5-aminoimidazole-4-carboxamide, N-carbamoylaspartate, Dihydroorotate, orotidine, Thymine, (3′-5′)-adenylylguanosine, nicotinamide riboside, NAD+, pyridoxamine, pyridoxamine phosphate, and homocitrate.

[0159] The invention and disclosure provides a probiotic composition comprising a combination of Bacillus strains. The invention and disclosure provides a feed additive composition comprising a combination of Bacillus strains. In an embodiment, the combination of Bacillus strains is a non-natural combination of strains, the strains would not ordinary be present in an animal in combination. The invention and disclosure provides a probiotic composition comprising at least one of: a first isolated Bacillus amyloliquefaciens strain, a second isolated Bacillus amyloliquefaciens strain, and a first isolated Bacillus subtilis strain; and a carrier suitable for animal administration. In a partical embodiment, a probiotic composition is provided comprising at least one of a first isolated Bacillus amyloliquefaciens strain, a second isolated Bacillus amyloliquefaciens strain, and a first isolated Bacillus subtilis strain wherein said composition reduces or inhibits the colonization of an animal by a pathogenic bacterium when an effective amount is administered to an animal, as compared to an animal not administered the composition. In an embodiment, a probiotic composition is provided comprising a first isolated Bacillus amyloliquefaciens strain, a second isolated Bacillus amyloliquefaciens strain, and a first isolated Bacillus subtilis strain wherein said composition reduces or inhibits the colonization of an animal by a pathogenic bacterium when an effective amount is administered to an animal, as compared to an animal not administered the composition.

[0160] In an embodiment, a probiotic composition is provided wherein the first isolated Bacillus amyloliquefaciens strain comprises a nucleic acid sequence having at least 95%, at least 96%, at least 97%, at least 98%, or at least 99% sequence identity with SEQ ID NO: 59. In an embodiment, the first isolated Bacillus amyloliquefaciens strain comprises a nucleic acid sequence having at least 95%, at least 96%, at least 97%, at least 98%, or at least 99% sequence identity with SEQ ID NO: 261. In an embodiment, the second Bacillus amyloliquefaciens strain comprises a nucleic acid sequence having at least 95%, at least 96%, at least 97%, at least 98%, or at least 99% sequence identity with SEQ ID NO: 133. In an embodiment, the second isolated Bacillus amyloliquefaciens strain comprises a nucleic acid sequence having at least 95%, at least 96%, at least 97%, at least 98%, or at least 99% sequence identity with SEQ ID NO: 262. In an embodiment, the first Bacillus subtilis strain comprises a nucleic acid sequence having at least 95%, at least 96%, at least 97%, at least 98%, or at least 99% sequence identity with SEQ ID NO:257. In an embodiment, the first Bacillus subtilis strain comprises a nucleic acid sequence having at least 95%, at least 96%, at least 97%, at least 98%, or at least 99% sequence identity with SEQ ID NO: 12, 13, 14, 15 and/or 16.

[0161] In some embodiments, the composition includes a first isolated Bacillus amyloliquefaciens strain including ELA191024 and a second isolated Bacillus amyloliquefaciens strain including ELA191036. In some embodiments, the composition includes a first isolated Bacillus amyloliquefaciens strain ELA191024 and a second isolated Bacillus amyloliquefaciens strain ELA191036. In some embodiments, the composition includes a first isolated Bacillus amyloliquefaciens strain ELA191024 and a second isolated Bacillus amyloliquefaciens strain ELA202071. In some embodiments, the composition includes a first isolated Bacillus amyloliquefaciens strain ELA191006 and a second isolated Bacillus amyloliquefaciens strain ELA202071.

[0162] In some embodiments, the composition includes a first isolated Bacillus amyloliquefaciens strain including ELA191024 or a second isolated Bacillus amyloliquefaciens strain including ELA191036, and a first isolated Bacillus subtilis strain including ELA191105. In some embodiments, the composition includes a first isolated Bacillus amyloliquefaciens strain including ELA191024 or a second isolated Bacillus amyloliquefaciens strain including ELA191006, and a first isolated Bacillus subtilis strain including ELA191105. In some embodiments, the composition includes a first isolated Bacillus amyloliquefaciens strain ELA191024 or ELA191006, a second isolated Bacillus amyloliquefaciens strain including ELA202071, and a first isolated Bacillus subtilis strain including ELA191105. In some embodiments, the composition includes a first isolated Bacillus amyloliquefaciens strain ELA191024, a second isolated Bacillus amyloliquefaciens strain including ELA202071, and a first isolated Bacillus subtilis strain including ELA191105. In some embodiments, the composition includes a first isolated Bacillus amyloliquefaciens strain ELA191006, a second isolated Bacillus amyloliquefaciens strain including ELA202071, and a first isolated Bacillus subtilis strain including ELA191105.

[0163] In embodiments, a feed additive composition is provided comprising a first isolated Bacillus amyloliquefaciens strain ELA191024, a second isolated Bacillus amyloliquefaciens strain including ELA202071, and a first isolated Bacillus subtilis strain including ELA191105. In some embodiments, a feed additive composition is provided comprising a first isolated Bacillus amyloliquefaciens strain ELA191006, a second isolated Bacillus amyloliquefaciens strain including ELA202071, and a first isolated Bacillus subtilis strain including ELA191105.

[0164] In embodiments, a feed additive composition is provided comprising Bacillus amyloliquefaciens strain ELA191024, Bacillus amyloliquefaciens strain including ELA202071, and Bacillus subtilis strain ELA191105 or an active and effective genetic variant thereof. In some embodiments, a feed additive composition is provided comprising Bacillus amyloliquefaciens strain ELA191006, Bacillus amyloliquefaciens strain including ELA202071, and Bacillus subtilis strain ELA191105 or an active and effective genetic variant thereof. In embodiments, the feed additive comprises spores or spore forms of the Bacillus strains. In embodiments, the feed additive comprises only spores or spore forms of the Bacillus strains. The feed additive composition may additionally or further comprise other components or carriers and may additionally comprise a prebiotic(s).

[0165] In some embodiments, the composition includes a first isolated Bacillus amyloliquefaciens strain including ELA191024, a second isolated Bacillus amyloliquefaciens strain including ELA191036, and a first isolated Bacillus subtilis strain including ELA191105. In some embodiments, the composition includes a first isolated Bacillus amyloliquefaciens strain including ELA191006, a second isolated Bacillus amyloliquefaciens strain including ELA191036, and a first isolated Bacillus subtilis strain including ELA191105.

[0166] Bacillus amyloliquefaciens strain ELA191024 (also denoted BAMY 19024) was deposited and corresponds to ATCC Patent Deposit Number PTA-126784. Bacillus amyloliquefaciens strain ELA191036 (also denoted BAMY 19036) was deposited and corresponds to ATCC Patent Deposit Number PTA-126785. Bacillus amyloliquefaciens strain ELA191006 (also denoted BAMY 19006) was deposited and corresponds to ATCC Patent Deposit Number PTA-127065. Bacillus amyloliquefaciens strain ELA202071 (also denoted BAMY 20071) was deposited and corresponds to ATCC Patent Deposit Number PTA-127064. Bacillus subtilis strain ELA191105 (also denoted ELA1901105 and BSUB 19105) was deposited and corresponds to ATCC Patent Deposit Number PTA-126786.

[0167] The genome nucleic acid sequence of Bacillus amyloliquefaciens strain ELA191024 (also denoted BAMY 19024) is provided in sequences SEQ ID NO:s 1˜4 and in SEQ ID NO:5. The genome nucleic acid sequence of Bacillus amyloliquefaciens strain ELA191036 (also denoted BAMY 19036) is provided in sequences SEQ ID NO:s 6-9 and in SEQ ID NO:10 and 11. The genome nucleic acid sequence of Bacillus amyloliquefaciens strain ELA191006 (also denoted BAMY 19006 or BAMY 006) is provided in sequences SEQ ID NO: 261. The genome nucleic acid sequence of Bacillus amyloliquefaciens strain ELA202071 (also denoted BAMY 202071 or BAMY 071) is provided in sequences SEQ ID NO: 262. The genome nucleic acid sequence of Bacillus subtilis strain ELA191105 (also denoted ELA1901105 and BSUB 19105 and BSUB 105) is provided in sequences SEQ ID NO:s 12-15 and in SEQ ID NO:16. Genomically related or variant Bacillus amyloliquefaciens strains having at least 80%, at least 85%, at least 90% at least 95%, at least 97%, at least 98%, at least 99% nucleic acid sequence identity to the genome sequence of SEQ ID NOs: 1-4, or of SEQ ID NO:5, or of SEQ ID NOs: 6-9, or of SEQ ID NO: 10 and 11, or of Bacillus strains of SEQ ID NOs:12-15, or of SEQ ID NO:16 are provided and contemplated as embodiments of the invention. Genomically related or variant Bacillus amyloliquefaciens strains having at least 80%, at least 85%, at least 90% at least 95%, at least 97%, at least 98%, at least 99% nucleic acid sequence identity to the genome sequence of SEQ ID NO: 261 or of SEQ ID NO: 262 are provided and contemplated as embodiments of the invention. Genomically related or variant Bacillus subtilis strains having at least 80%, at least 85%, at least 90% at least 95%, at least 97%, at least 98%, at least 99% nucleic acid sequence identity to the genome sequence of SEQ ID NO: 12, 13, 14, 15 and/or 16 are provided and contemplated as embodiments of the invention. Such genomically related or variant Bacillus strains are comparably capable of improving animal health and animal production performance. Such genomically related or variant Bacillus strains are capable of use and application in probiotic compositions in accordance with the invention. In an embodiment, such genomically related sequences include nucleic acid encoding one or more proteins provided herein as unusual genes or proteins of the respective strains. For example and illustratively, such proteins include SEQ ID NOs: 263-276 for strain BAMY 006, include proteins SEQ ID NOs: 277-284 for strain BAMY 071, and include proteins SEQ ID NOs: 285-305 for strain BSUB 105.

[0168] In embodiments, a feed additive of the probiotic composition is provided. In an embodiment, the feed additive comprises a combination of the spore forms of at least two of the Bacillus strains provided herein.

[0169] In some embodiments, the ratio of the first isolated Bacillus amyloliquefaciens strain and the second isolated Bacillus amyloliquefaciens strain is about 0.75-1.5:1. In some embodiments, the ratio of the first isolated Bacillus amyloliquefaciens strain, the second isolated Bacillus amyloliquefaciens strain, and the first isolated Bacillus subtilis strain is about 0.75-1.5:1:0.75-1.5. In a preferred embodiment, the composition contains equal amounts of the strains disclosed herein and above. The amount or ratio can be determined or characterized by any known method. For example, the ratio or amount can be characterized by the number of viable spores per gram dry weight of the probiotic composition.

[0170] In some embodiments, bacterial strains of the present disclosure include those that include polynucleotide sequences that share at least 70%, 75%, 80%, 81%, 82%, 83%, 84%, 85%, 86%, 87%, 88%, 89%, 90%, 91%, 92%, 93%, 94%, 95%, 96%, 97%, 98%, 99% or 100% sequence identity with at least one of: SEQ ID NOs:1-39, 48, 50, 52, 54, 56, 58, 59, 61, 63, 65, 67, 69, 71, 73, 75, 77, 79, 81, 83, 85, 87, 89, 91, 93, 95, 97, 99, 101, 103, 105, 107, 109, 111, 113, 115, 117, 119, 121, 123, 125, 127, 129, 131, 133, 135, 137, 139, 141, 143, 145, 147, 149, 151, 153, 155, 157, 159, 161, 163, 165, 167, 169, 171, 173, 175, 177, 179, 181, 183, 185, 187, 189, 191, 193, 195, 197, 199, 201, 203, 205, 207, 209, 211, 213, 215, 217, 219, 221, 223, 225, 227, 229, 231, 233, 235, 237, 239, 241, 243, 245, 247, 249, 251, 253, 255, and 257. In a further embodiments, bacterial strains of the present disclosure include those that comprise polypeptide sequences that share at least 70%, 75%, 80%, 81%, 82%, 83%, 84%, 85%, 86%, 87%, 88%, 89%, 90%, 91%, 92%, 93%, 94%, 95%, 96%, 97%, 98%, 99% or 100% sequence identity with at least one of: SEQ ID NOs:40-47, 49, 51, 53, 55, 57, 60, 62, 64, 66, 68, 70, 72, 74, 76, 78, 80, 82, 84, 86, 88, 90, 92, 94, 96, 98, 100, 102, 104, 106, 108, 110, 112, 114, 116, 118, 120, 122, 124, 126, 128, 130, 132, 134, 136, 138, 140, 142, 144, 146, 148, 150, 152, 154, 156, 158, 160, 162, 164, 166, 168, 170, 172, 174, 176, 178, 180, 182, 184, 186, 188, 190, 192, 194, 196, 198, 200, 202, 204, 206, 208, 210, 212, 214, 216, 218, 220, 222, 224, 226, 228, 230, 232, 234, 236, 10 238, 240, 242, 244, 246, 248, 250, 252, 254, 256, and 258. In a further embodiment, bacterial strains of the present disclosure include those that comprise polypeptide sequences that share at least 70%, 75%, 80%, 81%, 82%, 83%, 84%, 85%, 86%, 87%, 88%, 89%, 90%, 91%, 92%, 93%, 94%, 95%, 96%, 97%, 98%, 99% or 100% sequence identity with at least one of: SEQ ID NOs: 263, 264, 265, 266, 267, 268,269, 270, 271, 272, 273, 274, 275 and 276. In a further embodiment, bacterial strains of the present disclosure include those that comprise polypeptide sequences that share at least 70%, 75%, 80%, 81%, 82%, 83%, 84%, 85%, 86%, 87%, 88%, 89%, 90%, 91%, 92%, 93%, 94%, 95%, 96%, 97%, 98%, 99% or 100% sequence identity with at least one of: SEQ ID NOs: 277, 278, 279, 280, 281, 282, 283 and 284.

[0171] In a further embodiments, bacterial strains of the present disclosure include those that comprise polynucleotide sequences that encodes for a polypeptide sequence that share at least 70%, 75%, 80%, 81%, 82%, 83%, 84%, 85%, 86%, 87%, 88%, 89%, 90%, 91%, 92%, 93%, 94%, 95%, 96%, 97%, 98%, 99% or 100% sequence identity with at least one of: SEQ ID NOs: 40-47, 49, 51, 53, 57, 60, 62, 64, 66, 68, 70, 72, 74, 76, 78, 80, 82, 84, 86, 88, 90, 92, 94, 96, 98, 100, 102, 104, 106, 108, 110, 112, 114, 116, 118, 120, 122, 124, 126, 128, 130, 132, 134, 136, 138, 140, 142, 144, 146, 148, 150, 152, 154, 156, 158, 160, 162, 164, 166, 168, 170, 172, 174, 176, 178, 180, 182, 184, 186, 188, 190, 192, 194, 196, 198, 200, 202, 204, 206, 208, 210, 212, 214, 216, 218, 220, 222, 224, 226, 228, 230, 232, 234, 236, 238, 240, 242, 244, 246, 248, 20 250, 252, 254, 256, and 258. In a further embodiments, bacterial strains of the present disclosure include those that comprise polynucleotide sequences that encodes for a polypeptide sequence that share at least 70%, 75%, 80%, 81%, 82%, 83%, 84%, 85%, 86%, 87%, 88%, 89%, 90%, 91%, 92%, 93%, 94%, 95%, 96%, 97%, 98%, 99% or 100% sequence identity with at least one of: SEQ ID NOs: 285, 286, 287, 288, 289, 290, 291, 292, 293, 294, 295, 296, 297, 298, 299, 300, 301, 302, 303, 304 and 305.

[0172] Without wishing to be bound by theory, it is believed that the consortia of strains described above have a unique secretion profile that provides health benefits to an animal when they colonize the gastrointestinal tract of an animal. Furthermore, it is believed that the combination of a first isolated Bacillus amyloliquefaciens strain and a second isolated Bacillus amyloliquefacien strain, as described above, provide a unique combined metabolite secretion profile that provides health benefits to an animal when they colonize the gastrointestinal tract of an animal.

[0173] Even further, it is believed that the combination of a first isolated Bacillus amyloliquefaciens strain, a second isolated Bacillus amyloliquefaciens strain, and a first isolated Bacillus subtilis strain, as described above, provide a unique combined metabolite secretion profile that provides health benefits to an animal when they colonize the gastrointestinal tract of an animal.

[0174] It has been unexpectedly discovered that the combination of two different Bacillus amyloliquefaciens strains described above and herein result in the secretion of unique metabolites, when grown together. Such secreted metabolites include at least one of: histidine, N-acetylhistidine, phenyllactate (PLA), 1-carboxyethyltyrosine, 3-(4-hydroxyphenyl)lactate (HPLA), tryptophan, N-acetyltryptophan, anthranilate, indolelactate, isovalerylglycine, N-acetylisoleucine, N-acetylmethionine, urea, ornithine, spermidine, spermine, cysteinylglycine, pyruvate, sucrose, fumarate, deoxycarnitine, 2R,3R-dihydroxybutyrate, chiro-inositol, glycerophosphorylcholine (GPC), xanthine, AMP, 2′-deoxyadenosine, dihydroorotate, UMP, uridine, CMP, cytidine, (3′-5′)-adenylyluridine, (3′-5′)-cytidylyladenosine, (3′-5′)-cytidylylcytidine, (3′-5′)-cytidylyluridine, (3′-5′)-guanylylcytidine, (3′-5′)-guanylyluridine, (3′-5′)-uridylylcytidine, (3′-5′)-uridylyluridine, (3′-5′)-uridylyladenosine, NAD+, oxalate (ethanedioate), maltol, 1-methylhistidine, N6,N6-dimethyllysine, S-15 methylcysteine, and 2-methylcitrate.

[0175] Furthermore, it has been unexpectedly discovered that the combination of two different Bacillus amyloliquefaciens strains and one Bacillus subtilis strain described above and herein result in the secretion of unique metabolites, when grown together. Such secreted metabolites include at least one of: N-carbamoylserine, beta-citrylglutamate, N6-methyllysine, N6,N6-dimethyllysine, N6,N6,N6-trimethyllysine, saccharopine, cadaverine, N-succinyl-phenylalanine, 2-hydroxyphenylacetate, 3-(4-hydroxyphenyl)lactate (HPLA), N-acetyltryptophan, indolelactate, N-acetylleucine, 4-methyl-2-oxopentanoate, homocitrulline, dimethylarginine (ADMA+SDMA), N-monomethylarginine, guanidinoacetate, N(1)-acetylspermine, glucose 6-phosphate, Isobar: hexose diphosphates, ribitol, arabonate/xylonate, ribulonate/xylulonate/lyxonate, fructose, galactonate, isocitric lactone, fumarate, malate, 3-hydroxyhexanoate, 5-hydroxyhexanoate, myo-inositol, chiro-inositol glycerophosphoethanolamine, glycerophosphoinositol, 3-hydroxy-3-methylglutarate, Mevalonate, 5-aminoimidazole-4-carboxamide, 2′-AMP, 2′-O-methyladenosine, N6-succinyladenosine, guanosine 2′-monophosphate (2′-GMP), 2′-O-methyluridine, uridine 2′-monophosphate (2′-UMP), 5-methylcytosine, pantoate, pantothenate (Vitamin B5), glucarate (saccharate), hippurate, histidinol, homocitrate, pyrraline, 2-keto-3-deoxy-gluconate, pentose acid, N,N-dimethylalanine, Isobar: hexose diphosphates, 2-methylcitrate, and (3′-5′)-adenylylguanosine.

[0176] As used herein and in the context of bacterial consortia, “unique metabolites” include metabolites that are secreted at least 1.5, at least 2 fold, at least 3 fold, at least 5 fold, or at least 10 fold greater as compared to secretion of the respective metabolite by the bacterial strain grown individually. By way of example, the combination of a first isolated Bacillus amyloliquefaciens strain and a second isolated Bacillus amyloliquefaciens strain described above and herein secrete at least 2 fold more ornithine as compared to the two strains grown individually. By way of further example, the combination of a first isolated Bacillus amyloliquefaciens strain, a second isolated Bacillus amyloliquefaciens strain, and a first Bacillus subtilis strain described above and herein secrete at least 2 fold more glucose 6-phosphate, as compared to the three strains grown individually.

[0177] Combinations of two Bacillus amyloliquefaciens strains and a Bacillus subtilis strain, including strains 02, 036 and 105, or strains 06, 071 and 105 have been evaluated by metabolite and genome analysis and information is pwovided herein with regard to and which provides characteristics and the presence/absence of certain metabolites, enzymes, protins etc present, secreted, predicted to be encoded or absent in each strain or wth a combination of the strains. This data and information is provided in the Examples and Tables herein and may be references for these characteristics, proteins, metabolites, enzymes etc. Table 37 provides natural antibiotics or bacteriocins present or absent. Table 39 and 52 provides predicted proteins and secondary metabolites present or absent. Table 42 provides predicted antioxidants. Table 56 provides predicted antioxidants. Table 43 provides toxins or antitoxins. Table 44 provides digestive enzymes. Table 54 provides digestive enzymes. Table 45 provides antimicrobial resistance genes. Table 55 provides antimicrobial resistance genes. Table 48 provides metabolites uniquely secreted. Table 53 provides antimicrobial peptides.

[0178] In some embodiments, the composition includes a first isolated Bacillus amyloliquefaciens strain and second isolated Bacillus amyloliquefaciens strain, and does not contain a Bacillus subtilis strain.

[0179] In some embodiments, the composition does not include Lactobacillus. An example of a Lactobacillus species includes Lactobacillus reuteri and Lactobacillus crispatus, Lactobacillus vaginalis, Lactobacillus helveticus, and Lactobacillus johnsonii.

[0180] In some embodiments, the composition does not include non-Bacillus strains. Examples of non-Bacillus strains include Lactobacillus, Leuconostoc (e.g., Leuconostoc mesenteroides).

[0181] The composition may include or comprise live bacteria or bacterial spores, or a combination thereof.

[0182] In some embodiments, the composition does not include antibiotics. Exemplary antibiotics include tetracycline, bacitracin, tylosin, salinomycin, virginiamycin and bambermycin.

[0183] In some embodiments, the Bacillus strains of the present disclosure are not genetically engineered or genetically modified and do not contain heterologous genetic sequences.

[0184] The compositions described above may include a carrier suitable for animal consumption or use. Examples of suitable carriers include edible food grade material, mineral mixture, gelatin, cellulose, carbohydrate, starch, glycerin, water, glycol, molasses, corn oil, animal feed, such as cereals (barley, maize, oats, and the like), starches (tapioca and the like), oilseed cakes, and vegetable wastes. In some embodiments, the compositions include vitamins, minerals, trace elements, emulsifiers, aromatizing products, binders, colorants, odorants, thickening agents, and the like.

[0185] In some embodiments, the compositions include one or more biologically active molecule or therapeutic molecule. Examples of the aforementioned include ionophore; vaccine; antibiotic; antihelmintic; virucide; nematicide; amino acids such as methionine, glycine, and arginine; fish oil; krill oil; and enzymes.

[0186] In some embodiments, the compositions or combinations may additionally include one or more prebiotic. In some embodiments, the compositions may be administered along with or may be coadministered with one or more prebiotic. Prebiotics may include organic acids or non-digestible feed ingredients that are fermented in the lower gut and may serve to select for beneficial bacteria. Prebiotics may include mannan-oligosaccharides, fructo-oligosaccharides, galacto-oligosaccharides, chito-oligosaccharides, isomalto-oligosaccharides, pectic-oligosaccharides, xylo-oligosaccharides, and lactose-oligosaccharides.

[0187] The composition may be formulated as animal feed, feed additive, food ingredient, water additive, water-mixed additive, consumable solution, consumable spray additive, consumable solid, consumable gel, injection, or combinations thereof. The composition may be formulated and suitable for use as or in one or more of animal feed, feed additive, food ingredient, water additive, water-mixed additive, consumable solution, consumable spray additive, consumable solid, consumable gel, injection, or combinations thereof. The composition may be suitable and prepared for use as animal feed, feed additive, food ingredient, water additive, water-mixed additive, consumable solution, consumable spray additive, consumable solid, consumable gel, injection, or combinations thereof.

### Methods and Methods of Use

[0188] In some embodiments, the disclosure provides for the use of any of the compositions described above to improve a phenotypic trait of interest in an animal. As used herein, a probiotic is a composition that improves a phenotypic trait of interest in an animal.

[0189] In embodiments of the invention, an animal may include a farmed animal or livestock or a domesticated animal. Livestock or farmed animal may include cattle (e.g. cows or bulls (including calves)), poultry (including broilers, chickens and turkeys), pigs (including piglets), birds, aquatic animals such as fish, agastric fish, gastric fish, freshwater fish such as salmon, cod, trout and carp, e.g. koi carp, marine fish such as sea bass, and crustaceans such as shrimps, mussels and scallops), horses (including race horses), sheep (including lambs). A domesticated animal may be a pet or an animal maintained in a zoological environment and may include any relevant animal including canines (e.g. dogs), felines (e.g. cats), rodents (e.g. guinea pigs, rats, mice), birds, fish (including freshwater fish and marine fish), and horses.

[0190] The animal may be a pregnant or breeding animal, such as a pregnant sow or a pregnant pig.

[0191] Examples of improving a phenotypic trait includes decreasing pathogen-associated lesion formation in the gastrointestinal tract, decreasing colonization of pathogens, increasing feed digestibility, increasing meat quality, increasing milk quality, increasing egg quality, modulating microbiome, increasing short chain fatty acids, improving laying performance, increasing milk yield, and increasing gut health or characteristic (reducing permeability and inflammation).

[0192] Examples of pathogens include Eimeria spp., Salmonella Typhimurium, Salmonella Infantis, Salmonella Hadar, Salmonella Enteritidis, Salmonella Newport, Salmonella Kentucky, Clostridium perfringens, Staphylococcus aureus, Streptoccus uberis, Streptococcus suis, Escherichia coli, Campylobacter jejuni, Fusobacterium necrophorum, Avian pathogenic Escherichia coli (APEC), Pisciricketsia salmonis, Tenacibaculum spp., Salmonella Lubbock, Trueperella pyogenes, shiga toxin producing E. coli, enterotoxigenic E. coli, Campylobacter coli, and Lawsonia intracellularis.

[0193] A pathogen may be a bacteria or a virus. The virus may include a pathogenic virus infecting animals, including livestock animals or domesticated animals and may be specific for a particular animal such as a poultry virus or a swine virus.

[0194] The compositions may be used to treat an infection particularly a bacterial infection. In some aspects, the compositions described above are used to treat an infection from at least one of Eimeria spp., Salmonella Typhimurium, Salmonella Infantis, Salmonella Hadar, Salmonella Enteritidis, Salmonella Newport, Salmonella Kentucky, Clostridium perfringens, Staphylococcus aureus, Streptoccus uberis, Streptococcus suis, Escherichia coli, Campylobacter jejuni, Fusobacterium necrophorum, Avian pathogenic Escherichia coli (APEC), Salmonella Lubbock, Trueperella pyogenes, shiga toxin producing E. coli, enterotoxigenic E. coli, Campylobacter coli, and Lawsonia intracellularis. The compositions may be used to inhibit infection, particularly a bacterial infection. Infection may be by one or more of Eimeria spp., Salmonella Typhimurium, Salmonella Infantis, Salmonella Hadar, Salmonella Enteritidis, Salmonella Newport, Salmonella Kentucky, Clostridium perfringens, Staphylococcus aureus, Streptoccus uberis, Streptococcus suis, Escherichia coli, Campylobacter jejuni, Fusobacterium necrophorum, Avian pathogenic Escherichia coli (APEC), Salmonella Lubbock, Trueperella pyogenes, shiga toxin producing E. coli, enterotoxigenic E. coli, Campylobacter coli, and Lawsonia intracellularis.

[0195] In some aspects, the compositions described above are used to reduce colonization by or inhibit colonization by a bacteria in an animal, particularly in a herd or group of animals, particularly of pathogenic bacteria. In some aspects, the compositions described above are used to reduce colonization by or inhibit colonization of at least one of Eimeria spp., Salmonella Typhimurium, Salmonella Infantis, Salmonella Hadar, Salmonella Enteritidis, Salmonella Newport, Salmonella Kentucky, Clostridium perfringens, Staphylococcus aureus, Streptoccus uberis, Streptococcus suis, Escherichia coli, Campylobacter jejuni, Fusobacterium necrophorum, Avian pathogenic Escherichia coli (APEC), Salmonella Lubbock, Trueperella pyogenes, shiga toxin producing E. coli, enterotoxigenic E. coli, Campylobacter coli, and Lawsonia intracellularis.

[0196] In some aspects, the compositions described above are used to reduce transmission of bacteria, particularly pathogenic bacteria, in an animal pen or in a group or herd of animals. In some aspects, the compositions described above are used to reduce transmission in an animal pen or in a group or herd of animals of at least one of Eimeria spp., Salmonella Typhimurium, Salmonella Infantis, Salmonella Hadar, Salmonella Enteritidis, Salmonella Newport, Salmonella Kentucky, Clostridium perfringens, Staphylococcus aureus, Streptoccus uberis, Streptococcus suis, Escherichia coli, Campylobacter jejuni, Fusobacterium necrophorum, Avian pathogenic Escherichia coli (APEC), Salmonella Lubbock, Trueperella pyogenes, shiga toxin producing E. coli, enterotoxigenic E. coli, Campylobacter coli, and Lawsonia intracellularis.

[0197] In some aspects, the compositions described above are used to reduce bacterial load, particularly pathogenic bacteria or clinically significant bacteria, including the number or amount of bacteria in the gut or gastrointestinal tract of an animal. The bacteria may be selected from at least one of Eimeria spp., Salmonella Typhimurium, Salmonella Infantis, Salmonella Hadar, Salmonella Enteritidis, Salmonella Newport, Salmonella Kentucky, Clostridium perfringens, Staphylococcus aureus, Streptoccus uberis, Streptococcus suis, Escherichia coli, Campylobacter jejuni, Fusobacterium necrophorum, Avian pathogenic Escherichia coli (APEC), Salmonella Lubbock, Trueperella pyogenes, shiga toxin producing E. coli, enterotoxigenic E. coli, Campylobacter coli, and Lawsonia intracellularis.

[0198] In some aspects, the compositions described above are used to treat at least one of inflammatory bowel disease, obesity, liver abscess, ruminal acidosis, leaky gut syndrome, piglet diarrhea, necrotic enteritis, coccidiosis, salmon ricketsial septicemia, and foodborne diseases.

[0199] In one embodiment, examples of phenotypic traits of interest in animals include decreased feed conversion ratio, increased weight, increased lean body mass, decreased pathogen-associated lesion formation in the gastrointestinal tract, decreased colonization of pathogens, modulated microbiome, increased egg quality, increased feed digestibility, and decreased mortality rate, as compared to animals not administered the composition.

[0200] In one embodiment, examples of phenotypic traits of interest in poultry include decreased feed conversion ratio, increased weight, increased lean body mass, decreased pathogen-associated lesion formation in the gastrointestinal tract, decreased colonization of pathogens, modulated microbiome, increased egg quality, increased feed digestibility, and decreased mortality rate, as compared to poultry not administered the composition.

[0201] In one embodiment, examples of phenotypic traits of interest in swine include decreased feed conversion ratio, increased weight, increased lean body mass, decreased pathogen-associated lesion formation in the gastrointestinal tract, decreased colonization of pathogens, modulated microbiome, increased feed digestibility, prevention of or reduction of post-weaning diarrhea in piglets, reduction of fecal scores, increased piglet body weight or weight gain, reduced unconsumed feed, increased daily feed intake, improved weight gain to feed ratio and decreased mortality rate, as compared to swine not administered the composition.

[0202] Methods are provided herein for reduction of post-weaning diarrhea in an animal. Methods are provided herein for reduction of fecal scores in a herd or group or pen of animals. Methods are provided herein for increase in body weight, for weight gain, for reducing unconsumed feed, for increasing daily feed intake, or for improving weight gain to feed ratio in a animal or in a herd or group or pen of animals.

[0203] In some aspects, the animal administered an effective amount of the composition disclosed herein exhibits a decrease in the feed conversion ratio by at least 1%, at least 5%, at least 6%, at least 7%, at least 8%, at least 9%, at least 10%, or at least 15%. In some aspects, the poultry administered an effective amount of the composition disclosed herein exhibits a decrease in the feed conversion ratio by at least 1%, at least 5%, at least 6%, at least 7%, at least 8%, at least 9%, at least 10%, or at least 15%. In some aspects, the swine or pigs/piglets administered an effective amount of the composition disclosed herein exhibits a decrease in the feed conversion ratio by at least 1%, at least 5%, at least 6%, at least 7%, at least 8%, at least 9%, at least 10%, or at least 15%.

[0204] In some aspects, the animal administered an effective amount of the composition disclosed herein exhibits an increase in animal weight by at least 1%, at least 5%, at least 25%, 20 or at least 50%. In some aspects, the poultry administered an effective amount of the composition disclosed herein exhibits an increase in poultry weight by at least 1%, at least 5%, at least 25%, 20 or at least 50%. In some aspects, the swine or piglet administered an effective amount of the composition disclosed herein exhibits an increase in swine or piglet weight by at least 1%, at least 5%, at least 25%, 20 or at least 50%.

[0205] In some aspects, the animal administered an effective amount of the composition disclosed herein exhibits a decrease in pathogen-associated lesion formation in the gastrointestinal tract by at least 1%, at least 5%, at least 25%, or at least 50%. In some aspects, the poultry administered an effective amount of the composition disclosed herein exhibits a decrease in pathogen-associated lesion formation in the gastrointestinal tract by at least 1%, at least 5%, at least 25%, or at least 50%. In some aspects, the swine or piglet administered an effective amount of the composition disclosed herein exhibits a decrease in pathogen-associated lesion formation in the gastrointestinal tract by at least 1%, at least 5%, at least 25%, or at least 50%.

[0206] In some aspects, the animal administered an effective amount of the composition disclosed herein exhibits decrease in the mortality rate by at least 1%, at least 5%, at least 25%, or at least 50%. In some aspects, the poultry administered an effective amount of the composition disclosed herein exhibits decrease in the mortality rate by at least 1%, at least 5%, at least 25%, or at least 50%. In some aspects, the swine, piglet administered an effective amount of the composition disclosed herein exhibits decrease in the mortality rate by at least 1%, at least 5%, at least 25%, or at least 50%.

[0207] In some aspects, the poultry administered an effective amount of the composition exhibits an increase in production efficiency (European Broiler Index, EBI) by at least 6.0%, by at least 7%, by at least 10%, or by at least 15%.

[0208] The compositions may further include one or more component or additive. The one or more component or additive may be a component or additive to facilitate administration, for example by way of a stabilizer or vehicle, or by way of an additive to enable administration to an animal such as by any suitable administrative means, including in aerosol or spray form, in water, in feed or in an injectable form. Administration to an animal may be by any known or standard technique. These include oral ingestion, gastric intubation, or broncho-nasal spraying. The compositions disclosed herein may be administered by immersion, intranasal, intramammary, topical, mucosally, or inhalation. When the animal is a bird the treatment may be administered in ovo or by spray inhalation.

[0209] Compositions may include a carrier in which the bacterium or any such other components is suspended or dissolved. Such carrier(s) may be any solvent or solid or encapsulated in a material that is non-toxic to the inoculated animal and compatible with the organism. Suitable pharmaceutical carriers include liquid carriers, such as normal saline and other non-toxic salts at or near physiological concentrations, and solid carriers, such as talc or sucrose and which can also be incorporated into feed for farm animals. When used for administering via the bronchial tubes, the composition is preferably presented in the form of an aerosol. A dye may be added to the compositions hereof, including to facilitate chacking or confirming whether an animal has ingested or breathed in the composition.

[0210] When administering to animals, including farm animals, administration may include orally or by injection. Oral administration can include by bolus, tablet or paste, or as a powder or solution in feed or drinking water. The method of administration will often depend on the species being feed or administered, the numbers of animals being fed or administered, and other factors such as the handling facilities available and the risk of stress for the animal.

[0211] The dosages required will vary and need be an amount sufficient to induce an immune response or to effect a biological or phenotypic change or response expected or desired. Routine experimentation will establish the required amount. Increasing amounts or multiple dosages may be implemented and used as needed.

[0212] In an embodiment of the invention, the bacterial strains are administered in doses indicated as CFU/g or colony forming units of bacteria per gram. In an embodiment, the dose is in the range of 1×10³ to 1×10⁹ CFU/g. In an embodiment, the dose is in the range of 1×10³ to 1×10⁷. In an embodiment, the dose is in the range of 1×10⁴ to 1×10⁶. In an embodiment, the dose is in the range of 5×10⁴ to 1×10⁶. In an embodiment, the dose is in the range of 5×10⁴ to 6×10⁵. In an embodiment, the dose is in the range of 7×10⁴ to 3×10⁵. In an embodiment, the dose is approximately 50 K, 75K, 100 K, 125K, 150 K, 200 K, 300 K, 400 K, 500 K, 600 K CFU/g.

[0213] Administration of the compositions disclosed herein may include co-administration with a vaccine or therapeutic compound. Administration of the vaccine or therapeutic compound includes administration prior to, concurrently, or after the composition disclosed herein.

[0214] Suitable vaccines in accordance with this embodiment include a vaccine that aids in the prevention of coccidiosis.

[0215] In some embodiments, the methods described above are administered to an animal in the absence of antibiotics.

### Definitions

[0216] As used herein, “isolated” means that the subject isolate has been separated from at least one of the materials with which it is associated in a particular environment, for example, its natural environment.

[0217] Thus, an “isolate” does not exist in its naturally occurring environment; rather, it is through the various techniques known in the art that the microbe has been removed from its natural setting and placed into a non-naturally occurring state of existence. Thus, the isolated strain or isolated microbe may exist as, for example, a biologically pure culture in association with an acceptable carrier.

[0218] As used herein, “individual isolates” should be taken to mean a composition, or culture, comprising a predominance of a single species, or strain, of microorganism, following separation from one or more other microorganisms. The phrase should not be taken to indicate the extent to which the microorganism has been isolated or purified. However, “individual isolates” can include substantially only one species, or strain, of microorganism.

[0219] In certain aspects of the disclosure, the isolated Bacillus strain exists as isolated and biologically pure cultures. It will be appreciated by one of skill in the art, that an isolated and biologically pure culture of a particular Bacillus strain, denotes that said culture is substantially free (within scientific reason) of other living organisms and contains only the individual Bacillus strain in question. The culture can contain varying concentrations of said isolated Bacillus strain. The present disclosure notes that isolated and biologically pure microbes often necessarily differ from less pure or impure materials.

[0220] In some embodiments of the present invention, the composition includes a combination of two isolated Bacillus strains. In some embodiments of the present invention, the composition includes a combination of three isolated Bacillus strains.

[0221] As used herein, the term “bacterial consortia”, “bacterial consortium”, “microbial consortia” or “microbial consortium” refers to a subset of a microbial community of individual microbial species, or strains of a species, which can be described as carrying out a common function, or can be described as participating in, or leading to, or correlating with, a recognizable parameter, such as a phenotypic trait of interest (e.g. increased feed efficiency in poultry). The community may comprise two or more species, or strains of a species, of microbes. In some instances, the microbes coexist within the community symbiotically.

[0222] As used herein, “spore” or “spores” refer to structures produced by bacteria that are adapted for survival and dispersal. Spores are generally characterized as dormant structures; however, spores are capable of differentiation through the process of germination. Germination is the differentiation of spores into vegetative cells that are capable of metabolic activity, growth, and reproduction. The germination of a single spore results in a single bacterial vegetative cell. Bacterial spores are structures for surviving conditions that may ordinarily be nonconductive to the survival or growth of vegetative cells.

[0223] As used herein, the terms “colonize” and “colonization” include “temporarily colonize” and “temporary colonization”.

[0224] As used herein, “microbiome” refers to the collection of microorganisms that inhabit the gastrointestinal tract of an animal and the microorganisms' physical environment (i.e., the microbiome has a biotic and physical component). The microbiome is fluid and may be modulated by numerous naturally occurring and artificial conditions (e.g., change in diet, disease, antimicrobial agents, influx of additional microorganisms, etc.). The modulation of the gastrointestinal microbiome can be achieved via administration of the compositions of the disclosure can take the form of: (a) increasing or decreasing a particular Family, Genus, Species, or functional grouping of a microbe (i.e., alteration of the biotic component of the gastrointestinal microbiome) and/or (b) increasing or decreasing gastrointestinal pH, increasing or decreasing volatile fatty acids in the gastrointestinal tract, increasing or decreasing any other physical parameter important for gastrointestinal health (i.e., alteration of the abiotic component of the gut microbiome).

[0225] As used herein, “probiotic” refers to a substantially pure microbe (i.e., a single isolate) or a mixture of desired microbes, and may also include any additional components (e.g., carrier) that can be administered to an animal to provide a beneficial health effect. Probiotics or microbial compositions of the invention may be administered with an agent or carrier to allow the microbes to survive the environment of the gastrointestinal tract, i.e., to resist low pH and to grow in the gastrointestinal environment.

[0226] The term “growth medium” as used herein, is any medium which is suitable to support growth of a microbe. By way of example, the media may be natural or artificial including gastrin supplemental agar, minimal media, rich media, LB media, blood serum, and tissue culture gels. It should be appreciated that the media may be used alone or in combination with one or more other media. It may also be used with or without the addition of exogenous nutrients.

[0227] As used herein, “improved” should be taken broadly to encompass improvement of a characteristic of interest, as compared to a control group, or as compared to a known average quantity associated with the characteristic in question. For example, “improved” feed efficiency associated with application of a beneficial microbe, or microbial ensemble, of the disclosure can be demonstrated by comparing the feed efficiency of poultry treated by the microbes taught herein to the feed efficiency of poultry not treated. In the present disclosure, “improved” does not necessarily demand that the data be statistically significant (i.e. p<0.05); rather, any quantifiable difference demonstrating that one value (e.g. the average treatment value) is different from another (e.g. the average control value) can rise to the level of “improved.”

[0228] As used herein, the term “metabolite” refers to an intermediate or product of metabolism. In some embodiments, a metabolite includes a small molecule. Metabolites have various functions, including in fuel, structural, signaling, stimulatory and inhibitory effects on enzymes, as a cofactor to an enzyme, in defense, and in interactions with other organisms (such as pigments, odorants and pheromones). A primary metabolite is directly involved in normal 5 growth, development and reproduction. A secondary metabolite is not directly involved in these processes but usually has an important ecological function. Examples of metabolites include but are not limited to antibiotics and pigments such as resins and terpenes, etc. Metabolites, as used herein, include small, hydrophilic carbohydrates; large, hydrophobic lipids and complex natural compounds.

[0229] As used herein, “carrier”, “acceptable carrier”, or “pharmaceutical carrier” are used interchangeably and refer to a diluent, adjuvant, excipient, or vehicle with which the compound is administered. Such carriers can be sterile liquids, such as water and oils, including those of petroleum, animal, vegetable, or synthetic origin; such as peanut oil, soybean oil, mineral oil, sesame oil, and the like. Water or aqueous solution saline solutions and aqueous dextrose and glycerol solutions are preferably employed as carriers, in some embodiments as injectable solutions. Alternatively, the carrier can be a solid dosage form carrier, including but not limited to one or more of a binder (for compressed pills), a glidant, an encapsulating agent, a flavorant, and a colorant. The choice of carrier can be selected with regard to the intended route of administration and standard pharmaceutical practice. See Handbook of Pharmaceutical Excipients, (Sheskey, Cook, and Cable) 2017, 8th edition, Pharmaceutical Press; Remington's Pharmaceutical Sciences, (Remington and Gennaro) 1990, 18th edition, Mack Publishing Company; Development and Formulation of Veterinary Dosage Forms (Hardee and Baggot), 1998, 2nd edition, CRC Press.

[0230] As used herein, “delivery” or “administration” means the act of providing a beneficial activity to a host. The delivery may be direct or indirect. An administration could be by an oral, nasal, or mucosal route. For example without limitation, an oral route may be an administration through drinking water, a nasal route of administration may be through a spray or vapor, and a mucosal route of administration may be through direct contact with mucosal tissue. Mucosal tissue is a membrane rich in mucous glands such as those that line the inside surface of the nose, mouth, esophagus, trachea, lungs, stomach, gut, intestines, and anus. In the case of birds, administration may be in ovo, i.e. administration to a fertilized egg. In ovo administration can be via a liquid which is sprayed onto the egg shell surface, or an injected through the shell.

[0231] As used herein, the terms “treating”, “to treat”, or “treatment”, include restraining, slowing, stopping, inhibiting, reducing, ameliorating, or reversing the progression or severity of an existing symptom, disorder, condition, or disease. A treatment may also be applied prophylactically to prevent or reduce the incidence, occurrence, risk, or severity of a clinical symptom, disorder, condition, or disease.

[0232] As used herein, “animal” includes bird, poultry, a human, or a non-human mammal. Specific examples include chickens, turkey, dogs, cats, cattle, salmon, fish, swine and horse. The chicken may be a broiler chicken, egg-laying, or egg-producing chicken. As used herein, the term “poultry” includes domestic fowl, such as chickens, turkeys, ducks, and geese.

[0233] As used herein, “gut” refers to the gastrointestinal tract including stomach, small intestine, and large intestine. The term “gut” may be used interchangeably with “gastrointestinal tract”.

[0234] Any examples or illustrations given herein are not to be regarded in any way as restrictions on, limits to, or express definitions of any term or terms with which they are utilized. Instead, these examples or illustrations are to be regarded as being described with respect to one particular embodiment and as being illustrative only. Those of ordinary skill in the art will appreciate that any term or terms with which these examples or illustrations are utilized will encompass other embodiments which may or may not be given therewith or elsewhere in the specification and all such embodiments are intended to be included within the scope of that term or terms. Language designating such nonlimiting examples and illustrations includes, but is not limited to: “for example,” “for instance,” “e.g.,” and “in one embodiment.” In this specification, groups of various parameters containing multiple members are described. Within a group of parameters, each member may be combined with any one or more of the other members to make additional sub-groups. For example, if the members of a group are a, b, c, d, and e, additional sub-groups specifically contemplated include any one, two, three, or four of the members, e.g., a and c; a, d, and e; b, c, d, and e; etc.

[0235] Throughout this specification, quantities are defined by ranges, and by lower and upper boundaries of ranges. Each lower boundary can be combined with each upper boundary to define a range. The lower and upper boundaries should each be taken as a separate element. Two lower boundaries or two upper boundaries may be combined to define a range.

### Deposit Information

[0236] Bacillus amyloliquefaciens strain “ELA191024” was deposited on 19 Jun. 2020 according to the Budapest Treaty in the American Type Culture Collection (ATCC), ATCC Patent Depository, 10801 University Boulevard, Manassas, Va., 20110, USA. The deposit has been assigned ATCC Patent Deposit Number PTA-126784.

[0237] Bacillus amyloliquefaciens strain “ELA191036” was deposited on 19 Jun. 2020 according to the Budapest Treaty in the American Type Culture Collection (ATCC), ATCC Patent Depository, 10801 University Boulevard, Manassas, Va., 20110, USA. The deposit has been assigned ATCC Patent Deposit Number PTA-126785.

[0238] Bacillus amyloliquefaciens strain “ELA191006” was deposited on 11 May 2021 according to the Budapest Treaty in the American Type Culture Collection (ATCC), ATCC Patent Depository, 10801 University Boulevard, Manassas, Va., 20110, USA. The deposit has been assigned ATCC Patent Deposit Number PTA-127065.

[0239] Bacillus amyloliquefaciens strain “ELA202071” was deposited on 11 May 2021 according to the Budapest Treaty in the American Type Culture Collection (ATCC), ATCC Patent Depository, 10801 University Boulevard, Manassas, Va., 20110, USA. The deposit has been assigned ATCC Patent Deposit Number PTA-127064.

[0240] Bacillus subtilis strain “ELA191105” was deposited on 19 Jun. 2020 according to the Budapest Treaty in the American Type Culture Collection (ATCC), ATCC Patent Depository, 10801 University Boulevard, Manassas, Va., 20110, USA. The deposit has been assigned ATCC Patent Deposit Number PTA-126786.

[0241] Access to the deposits will be available during the pendency of this application to persons determined by the Commissioner of Patents and Trademarks to be entitled thereto under 37 C.F.R. § 1.14 and 35 U.S.C. § 122. Upon allowance of any embodiments in this application, all restrictions on the availability to the public of the variety will be irrevocably removed.

[0242] The deposits will be maintained in the ATCC depository, which is a public depository, for a period of 30 years, or 5 years after the most recent request, or for the effective life of the patent, whichever is longer, and will be replaced if a deposit becomes nonviable during that period.

[0243] The present disclosure may be better understood with reference to the examples, set forth below. The following examples are put forth so as to provide those of ordinary skill in the art with a complete disclosure and description of how the compounds, compositions, and/or methods claimed herein are made and evaluated, and are intended to be purely exemplary and are not intended to limit the disclosure. It will be appreciated that other embodiments and uses will be apparent to those skilled in the art and that the invention is not limited to these specific illustrative examples or preferred embodiments.

### EXAMPLES

### Example 1. Isolation of Bacillus Strains

[0244] Samples are isolated from chicken cecal samples. The samples are either heated to 90° C. for 10 minutes or treated with ethanol to a final concentration of 50% for 1 hour for spore isolation. The treated samples are plated on LB medium and the resulting colonies are purified by three sequential transferred onto LB agar plates. Identity of isolates is determined by amplification of 16S-rRNA gene followed by DNA Sanger sequencing of the PCR amplicon.

### Example 2. Strain Characterization and Selection

[0245] Inhibition of bacterial strains by ELA191024, ELA191036, and ELA191105 is tested. Table 2 summarizes the results of inhibition of isolated strains.

TABLE 2

| Strain | | | APEC | APEC | APEC | CP | Salmonella | C. |
|---|---|---|---|---|---|---|---|---|
| ID | Origin | ID | O2 | O78 | O18 | 15 | Thypimurium | jejuni |
| 14 | Poultry | B. | ++ | + | ++ | ++ | x | x |
| | cecum, BRRS | amyloliquefaciens | | | | | | |
| 42 | Poultry | B. | +++ | + | + | ++ | x | x |
| | cecum, BRRS | amyloliquefaciens | | | | | | |
| 64 | Poultry | B. | + | | | | +++ | ++++ |
| | cecum, BRRS | amyloliquefaciens | | | | | | |
| 80 | Poultry | B. | +++ | + | ++ | ++ | x | x |
| | cecum, BRRS | amyloliquefaciens | | | | | | |
| 30 | Poultry | B. | ++ | + | ++ | ++ | ++ | +++ |
| | cecum, CQR | amyloliquefaciens | | | | | | |
| 44 | Poultry | Bacillus | + | + | + | + | + | + |
| | cecum, CQR | licheniformis | | | | | | |
| 65 | Poultry | B. | ++ | ++ | ++ | ++ | x | x |
| | cecum, BRRS | amyloliquefaciens | | | | | | |
| 7 | Poultry | Bacillus pumilus | + | − | − | − | − | − |
| | cecum, BRRS | | | | | | | |
| 36 | Poultry | B. | +++ | + | +++ | ++ | + | ++ |
| | cecum, BRRS | amyloliquefaciens | | | | | | |
| 84 | Poultry | Bacillus subsilis | ++ | + | + | + | + | x |
| | cecum, BRRS | | | | | | | |
| 105 | Poultry | Bacillus subsilis | +++ | + | +++ | ++ | + | − |
| | cecum, BRRS | | | | | | | |
| 114 | Poultry | Bacillus pumilus | + | − | − | − | x | x |
| | cecum, BRRS | | | | | | | |
| 121 | Poultry | Bacillus pumilus | + | − | − | − | x | x |
| | cecum, BRRS | | | | | | | |
| 4 | Poultry | Bacillus | +++ | ++ | ++ | ++ | ++ | + |
| | cecum, BRRS | licheniformis | | | | | | |
| 25 | Poultry | B. | +++ | ++ | ++ | ++ | x | x |
| | cecum, BRRS | amyloliquefaciens | | | | | | |
| 137 | Poultry | B. | +++ | ++ | ++ | ++ | ++ | + |
| | cecum, BRRS | amyloliquefaciens | | | | | | |
| 139 | Poultry | B. | +++ | + | + | ++ | x | x |
| | cecum, BRRS | amyloliquefaciens | | | | | | |
| 153 | Poultry | B. | +++ | ++ | ++ | ++ | x | x |
| | cecum, BRRS | amyloliquefaciens | | | | | | |
| 160 | Poultry | B. | +++ | + | ++ | ++ | x | x |
| | cecum, BRRS | amyloliquefaciens | | | | | | |
| 165 | Poultry | B. | +++ | ++ | ++ | ++ | x | x |
| | cecum, BRRS | amyloliquefaciens | | | | | | |
| 24 | Poultry | B. | ++ | ++ | ++ | ++ | ++ | ++ |
| | cecum, BRRS | amyloliquefaciens | | | | | | |

Note:
Clostridium perfringens strain 15
Strain ID 24 is ELA191024, Strain ID 36 is ELA191036, and Strain ID 105 is ELA191105.

[0246] Compatibility of isolated strains are tested (compatibility test). One strain is streaked perpendicular to the other strain on LB agar plate. See FIGS. 3A and 3B for an exemplary compatibility test. Clearance zone in the intersection suggest strain incompatibility. The data from the compatibility test are summarized in Table 3.

TABLE 3

| Isolate | | | | | | | | | |
|---|---|---|---|---|---|---|---|---|---|
| # | 4 | 7 | 24 | 30 | 36 | 44 | 64 | 105 | 137 |
| 4 | X | x | x | x | x | x | x | x | x |
| 7 | YES | x | x | x | x | x | x | x | x |
| 24 | YES | YES | x | x | x | x | x | x | x |
| 30 | YES | YES | YES | x | x | x | x | x | x |
| 36 | YES | YES | YES | YES | x | x | x | x | x |
| 44 | NO | YES | NO | NO | NO | x | x | x | x |
| 64 | YES | YES | YES | YES | YES | NO | x | x | x |
| 105 | SLIGHT | YES | SLIGHT | SLIGHT | SLIGHT | YES | SLIGHT | x | x |
| 137 | YES | YES | YES | YES | YES | NO | YES | YES | x |

YES-compatible; NO-incompatible; SLIGHT-slight inhibition. Strain key: 4-Bacillus licheniformis, 7-Bacillus licheniformis, 24-B. amyloliquefaciens (ELA191024), 30-B. amyloliquefaciens, 36-B. amyloliquefaciens ELA191036, 44-Bacillus licheniformis, 64-B. amyloliquefaciens, 105-Bacillus licheniformis Bacillus licheniformis (ELA191105), and 137-B. amyloliquefaciens.

### Examples 3-10. Characterization of Strains ELA191024, ELA191036, and ELA191105

### Example 3. Antibiotic Susceptibility

[0247] Antibiotic susceptibility of Strains ELA191024 and ELA191105 are tested. ELA191024 and ELA191105 are susceptible to chloramphenicol, gentamicin, tetracycline, erythromycin, clindamycin, streptomycin, kanamycin, and vancomycin.

### Example 4. Growth Media

[0248] Growth on arbinoxylan and banana starch as the sole growth media are tested. ELA191024, ELA191036, and ELA191105 are capable of growth on the aforementioned as the sole growth substrates.

### Example 5. Sporulation

[0249] Sporulation of ELA191024, ELA191036, and ELA191105 is tested. ELA191024, ELA191036, and ELA191105 formed spores in tested sporulation medium (Difco Sporulation Medium, DSM) and the culture is grown at 37° C. for 72 h.

### Example 6. Digestive Enzyme Analysis

[0250] Amylase and protease activities of ELA191024, ELA191036, and ELA191105 are tested following protocol as described by Latorre, J D, 2016. Briefly, overnight culture of Bacillus isolate is spotted onto agar plate containing soluble starch and skim milk for amylase and protease assay, respectively. The plates are incubated at 37° C. for 48 h. The zone of clearance due to protease activity is observed directly whereas zone of clearance from amylase activity was visualized by flooding the surface of the plates with 5 mL of Gram's iodine solution. Protease activity of ELA191024, ELA191036, and ELA191105 are tested by way of protease assay. See FIG. 2. Amylase and protease activity are observed.

[0251] Beta-mannanase activity for ELA191024, ELA191036, and ELA191105 are tested. The strains are capable of digesting galactomannan.

### Example 7. Cytotoxicity Assay

[0252] Cytotoxicity of ELA191024, ELA191036, and ELA191105 are tested against Vero cells. Cytotoxicity is measured by LDH cytotoxicity test. Positive control: Bacillus cereus DSM 31 (ATCC 14579) (78.6% cytotoxicity); Negative control: Bacillus licheniformis ATCC 14580 (−0.1% cytotoxicity); Test control: Subtilis 747 (Correlink™ strain) (8.7% cytotoxicity; non-toxic). ELA191024, ELA191036, and ELA191105 strains are not cytotoxic to Vero cells. The percent cytotoxicity is less than 10.

### Example 8. Genomic Analysis

[0253] ELA191024, ELA191036, and ELA191105 are sequenced and some genomic features are described in Table 4.

TABLE 4

| | B. amyloliquefaciens 24 | B. amyloliquefaciens 36 | B. subtilis105 |
|---|---|---|---|
| Features | (ELA191024) | (ELA191036) | (ELA 191105) |
| Contigs | 1 | 2 | 1 |
| Coverage | 214x | 188x | 117x |
| | | 500x | |
| % GC | 45 | 44 | 43 |
| Length (Mbp) | 4.09 | 4.31 | 4.089 |

[0254] ELA191105 possesses over 150 genes that are absent in ELA191024 and ELA191036. Some of the unique genes include Metabolic enzymes (Phosphosulfolactate synthase, ethanolamine/propanediol utilization, Malate/lactate dehydrogenase); Antioxidant (Prokaryotic glutathione synthetase); Transporters (Organic Anion Transporter Polypeptide (OATP) family); and Digestive enzymes (alpha-amylase).

### Example 9. Genomic Analysis

[0255] Strains ELA191024, ELA191036, and ELA191105 are sequenced and the genomes are analyzed. Table 5 summarizes some of the digestive enzyme identified in genomic analysis of the strains.

TABLE 5

| Digestive enzymes | ELA191024 | ELA191036 | ELA191105 |
|---|---|---|---|
| Lipase | Present | Present | Present |
| 3-Phytase | Present | Present | Present |
| Endo-1,4-beta-mannosidase | Present | Present | Present |
| (Beta-D-mannanase) | | | |
| 1,4-α-glucan branching | Absent | Absent | Present |
| enzyme GlgB | | | |
| 6-phospho-beta-galactosidase | Present | Present | Absent |
| Alpha-amylase | Present | Present | Present |
| Alpha-galactosidase | Present | Present | Present |
| Beta-glucanase | Present | Present | Present |
| Beta-hexosaminidase | Present | Present | Present |
| Endo-1,4-beta-xylanase A | Present | Present | Present |
| Endoglucanase | Present | Present | Present |
| L-Ala--D-Glu endopeptidase | Present | Present | Present |
| Maltose-6′ phosphate | Present | Present | Present |
| glucosidase | | | |
| Oligo-1,6-glucosidase | Present | Present | Present |
| Oligo-1,6-glucosidase 1 | Absent | Absent | Present |
| Pectate lyase | Present | Present | Present |
| Pectate lyase C | Absent | Absent | Present |
| Pectin lyase | Present | Present | Present |
| Pullulanase | Absent | Absent | Present |
| putative 6-phospho- | Present | Present | Present |
| beta- glucosidase | | | |
| putative oligo- | Present | Present | Present |
| 1,6-glucosidase2 | | | |

[0256] Table 6 summarizes some of exemplary antimicrobial peptide and secondary metabolite genes identified in genomic analysis of the strains.

TABLE 6

| | | | | |
|---|---|---|---|---|
| Features | Remark | ELA191024 | ELA191036 | ELA191105 |

A. Bacterio [symbol]
Ribosomally synthesized

| | | | | |
|---|---|---|---|---|
| Lichenicidin A | Active aga [symbol] Cam- | Present | Present | Absent |
| | positive pathogens, Listeria | | | |
| | monocytogenes, MRSA, | | | |
| | Vancomycine-resistant | | | |
| | Enterococcus | | | |
| Circularin | Active against Streptococci, | Present | Present | Absent |
| | Listeria, enterococci, | | | |
| | Micrococcus and | | | |
| | Staphylococcus | | | |
| LCI | Highly potent against | Present | Present | Absent |
| | [symbol] | | | |
| Subtil [symbol] A | Active against Gram | Absent | Absent | Present |
| | positive bacter [symbol] | | | |

Non-ribosomally synthesized

| | | | | |
|---|---|---|---|---|
| [symbol] lipastatin | [symbol] | Present | Present | Present |
| Surfactin | Antibacterial, antifungal, | Present | Present | Present |
| | antiviral, antimycopla [symbol] | | | |
| Bacillibactin | [symbol] for | | | |
| | [symbol] acquisition | | | |
| Bacilysin | Active against broad range | Present | Present | Present |
| | of bacteria and fungi | | | |
| Gramicidin/Tyrocidine | Antimicrobial (Gram | Present | Present | Absent |
| | positive and negative) | | | |
| Terpene-derived | Terpenoid [symbol] -cell | 2 clusters | 2 clusters | 2 clusters |
| metabolites | signalling associated with | | | |
| | antagonistic interactions. | | | |
| | Volatile terpenes- | | | |
| | antibacterial, antifungal, | | | |
| | and [symbol] matodes | | | |
| Polyketide-derived | Antimicrobial activities | 3 clusters | 3 clusters | 3 clusters |
| metabolites | | | | |

[symbol]

indicates data missing or illegible when filed

### Example 10. Global Metabolomics Analysis

[0257] A global metabolomics analysis of strains B. amyloliquefaciens (ELA191024), B. amyloliquefaciens strain (ELA191036), and strain B. subtilis (ELA191105) is conducted. The strains are grown individually and in combination, and the resulting cell pellet and supernatant are analyzed to identify metabolites. Strains are grown at 37° C. for 24 hours in minimal media or rich media. Fresh media (no cells) were used as control samples. The metabolites in the supernatant represent molecules that are secreted by the cell.

[0258] Minimal medium: M9 salts with 0.5 g casamino acids/L and 1% glucose. M9 salts contains Disodium Phosphate (anhydrous) 6.78 g/L, Monopotassium Phosphate 3 g/L, Sodium Chloride 0.5 g/L, Ammonium Chloride 1 g/L. Rich medium: Bacillus broth (per liter): Peptone 30 g; Sucrose 30 g; Yeast extract 8 g; KH2PO4 4 g; MgSO4 1.0 g; MnSO4 25 mg.

[0259] Samples are prepared using the automated MicroLab STAR® system from Hamilton Company. Several recovery standards are added prior to the first step in the extraction process for QC purposes. Samples are extracted with methanol under vigorous shaking for 2 min (Glen Mills GenoGrinder 2000) to precipitate protein and dissociate small molecules bound to protein or trapped in the precipitated protein matrix, followed by centrifugation to recover chemically diverse metabolites. The resulting extract is divided into five fractions: two for analysis by two separate reverse phase (RP)/UPLC-MS/MS methods using positive ion mode electrospray ionization (ESI), one for analysis by RP/UPLC-MS/MS using negative ion mode ESI, one for analysis by HILIC/UPLC-MS/MS using negative ion mode ESI, and one reserved for backup. Samples are placed briefly on a TurboVap® (Zymark) to remove the organic solvent. The sample extracts are stored overnight under nitrogen before preparation for analysis.

[0260] Ultrahigh Performance Liquid Chromatography-Tandem Mass Spectroscopy (UPLC-MS/MS): All methods utilize a Waters ACQUITY ultra-performance liquid chromatography (UPLC) and a Thermo Scientific Q-Exactive high resolution/accurate mass spectrometer interfaced with a heated electrospray ionization (HESI-II) source and Orbitrap mass analyzer operated at 35,000 mass resolution. The sample extract is dried then reconstituted in solvents compatible to each of the four methods. Each reconstitution solvent contains a series of standards at fixed concentrations to ensure injection and chromatographic consistency. One aliquot is analyzed using acidic positive ion conditions, chromatographically optimized for more hydrophilic compounds. In this method, the extract is gradient-eluted from a C18 column (Waters UPLC BEH C18-2.1×100 mm, 1.7 μm) using water and methanol, containing 0.05% perfluoropentanoic acid (PFPA) and 0.1% formic acid (FA). A second aliquot is also analyzed using acidic positive ion conditions, but is chromatographically optimized for more hydrophobic compounds. In this method, the extract is gradient eluted from the aforementioned C18 column using methanol, acetonitrile, water, 0.05% PFPA, and 0.01% FA, and is operated at an overall higher organic content. A third aliquot is analyzed using basic negative ion optimized conditions using a separate dedicated C18 column. The basic extracts are gradient-eluted from the column using methanol and water, however with 6.5 mM Ammonium Bicarbonate at pH 8. The fourth aliquot is analyzed via negative ionization following elution from a HILIC column (Waters UPLC BEH Amide 2.1×150 mm, 1.7 μm) using a gradient consisting of water and acetonitrile with Ammonium Formate, pH 10.8. The MS analysis alternates between MS and data-dependent MSn scans using dynamic exclusion. The scan range covers approximately 70-1000 m/z.

[0261] Data are subject to global untargeted metabolic profiling. Welch t-test and Principal Component Analysis (PCA) are used to analyze the data. Principal component analysis (PCA) is a mathematical procedure that reduces the dimensionality of the data while retaining most of the variation in a dataset. This approach allows visual assessment of the similarities and differences between samples (growth conditions, including media type and strains present). Populations that differ are expected to group separately and vice versa. See FIGS. 5A and 5B.

[0262] Metabolite Quantification and Block Correction: Peaks are quantified as area-under-the-curve detector ion counts. For studies spanning multiple days, a data adjustment step is performed to correct block variation resulting from instrument inter-day tuning differences, while preserving intra-day variance. Essentially, each compound is corrected in balanced run-day blocks by registering the daily medians to equal one (1.00), and adjusting each data point proportionately (termed the “block correction”). For studies that do not require more than one day of analysis, no adjustment of raw data is necessary, other than scaling for purposes of data visualization.

[0263] Metabolite is identified as unique to a single strain if the value for the secreted metabolite is at least 1.5-fold greater than those of the other two single isolates. Unique metabolites for strain consortia are determined using>1.5-fold cut off compared to values of respective metabolites secreted by single isolates of the consortium. Table 7 summarizes the total number of metabolites identified as being secreted into the growth media. Total indicates the total number of metabolites detected both growth conditions. The column marked Unique indicates the total number of non-duplicate metabolites between each growth condition.

TABLE 7

| Category | ELA191024 | ELA191036 | ELA191105 |
|---|---|---|---|
| Metabolites in rich medium | 151 | 204 | 231 |
| Metabolites in minimal | 112 | 102 | 111 |
| medium | | | |
| Total metabolites | 206 | 248 | 272 |

[0264] Table 8 summarizes the number of unique metabolites of single Bacillus and Bacillus in consortia with 1.5 fold threshold. Numbers in parenthesis indicate a 2-fold threshold.

TABLE 8

| | Number of unique |
|---|---|
| Bacillus isolates | metabolites |
| ELA191024 | 30 (15) |
| ELA191036 | 84 (48) |
| ELA191105 | 77 (45) |
| ELA191024 and ELA191036 | 49 (34) |
| ELA191024, ELA191036, and ELA191105 | 57 (19) |

[0265] Strains ELA191024, ELA191036, and ELA191105 are cultured individually in minimal media and the supernatant is analyzed for secreted metabolites. Table 9 provides an exemplary list of metabolites secreted by each strain. Unless otherwise noted, the metabolite is at least 1.5 fold greater than the media control.

TABLE 9

| METABOLITE | ELA191024 | ELA191036 | ELA191105 |
|---|---|---|---|
| N-acetyl-cadaverine | No | Yes | No |
| isovalerate (C5) | No | Yes^{A, B, C} | Yes^{A} |
| N-acetylisoleucine | Yes^{A} | Yes^{A, B, C} | Yes^{A, B, C} |
| Homocysteine | Yes^{A, B, C} | Yes^{A, B, C} | Yes^{A, B, C} |
| Homocystine | Yes^{A, B, C} | Yes^{A, B, C} | Yes^{A, B, C} |
| N-acetylcitrulline | Yes^{A, B, C} | Yes^{A, B, C} | Yes^{A, B, C} |
| Glucoronate | No | Yes^{A} | No |
| alpha-ketoglutarate | Yes^{A, B, C} | Yes^{A, B, C} | Yes^{A, B, C} |
| 5-hydroxyhexanoate | Yes^{A} | Yes^{A, B, C} | Yes^{A, B} |
| glycerol 3-phosphate | No | Yes^{A, B} | Yes^{A} |
| 5-aminoimidazole-4- | Yes | No | No |
| carboxamide | | | |
| Hypoxanthine | Yes^{A, B, C} | Yes^{A, B, C} | Yes^{A, B, C} |
| Guanine | Yes^{A, B, C} | Yes^{A, B, C} | Yes^{A, B, C} |
| Orotate | Yes^{A, B, C} | Yes^{A, B, C} | Yes^{A, B, C} |
| Orotidine | No | Yes^{A} | No |
| 5,6-dihydrouridine | Yes^{A} | Yes^{A, B, C} | Yes^{A, B} |
| 3-dehydroshikimate | Yes^{A, B} | Yes^{A, B, C} | Yes^{A, B} |
| Kynurenate | No | Yes | No |
| Indolactate | No | No | Yes |
| Cyclo (gly-pro) | No | No | Yes |
| Cyclo (his-phe) | Yes^{A, B} | Yes^{A, B, C} | Yes^{A, B, C} |
| Cyclo(phe-pro) | No | Yes | No |
| Cyclo(phe-pro) (L,D) | No | Yes | Yes |
| 1-kestose | Yes^{A, B, C} | No | Yes^{A, B} |
| Thioproline | Yes^{A, B, C} | Yes^{A, B, C} | Yes^{A, B, C} |
| N-acetylaspartate (NAA) | No | Yes^{A, B, C} | Yes^{A, B} |
| Glutamine | Yes^{A} | No | Yes |
| Tryptophan | Yes^{A, B, C} | Yes^{A, B} | Yes^{A, B, C} |
| Cysteine | Yes^{A, B, C} | Yes^{A, B, C} | Yes^{A, B, C} |
| Pyridoxamine | Yes^{A, B, C} | Yes^{A, B, C} | Yes^{A, B, C} |
| Pyridoxamine phosphate | No | Yes^{A} | Yes^{A} |
| pantothenate (Vitamin | Yes^{A, B} | Yes^{A, B, C} | Yes^{A, B, C} |
| B5) | | | |
| pyridoxine (Vitamin B6) | No | No | Yes^{A} |
| 2R,3R-dihydroxybutyrate | Yes^{A, B, C} | Yes^{A, B, C} | Yes^{A, B, C} |
| Choline | Yes^{A, B} | No | Yes^{A, B, C} |
| 5-aminoimidazole-4- | | | No |
| carboxamide | | | |
| trigonelline (N′- | Yes^{A, B, C} | Yes^{A, B, C} | Yes^{A, B, C} |
| methylnicotinate) | | | |
| Mevalonolactone | Yes^{A, B, C} | Yes^{A, B, C} | Yes^{A, B, C} |
| Tricarballylate | Yes^{A} | Yes | No |

A-metabolite is secreted at least 2 fold greater than media control; B-metabolite is secreted at least 3 fold greater than media control; C-metabolite is secreted at least 5 fold greater than media control.

[0266] Strains ELA191024, ELA191036, and ELA191105 are cultured individually in rich media and the supernatant is analyzed for secreted metabolites. Table 10 provides an exemplary list of metabolites secreted by each strain. Unless otherwise noted, the metabolite is at least 1.5 fold greater than the media control.

TABLE 10

| METABOLITE | ELA191024 | ELA191036 | ELA191105 |
|---|---|---|---|
| N-acetyl-cadaverine | No | No | Yes^{A, B} |
| isovalerate (C5) | No | No | Yes^{A} |
| N-acetylisoleucine | Yes^{A} | No | Yes^{A, B, C} |
| Homocystine | Yes^{A, B} | No | No |
| Homocysteine | Yes^{A, B, C} | Yes^{A, B, C} | Yes^{A, B, C} |
| N-acetylcitrulline | Yes^{A, B, C} | No | No |
| Glucoronate | No | No | Yes^{A, B, C} |
| alpha-ketoglutarate | Yes^{A, B, C} | Yes^{A, B, C} | No |
| 5-hydroxyhexanoate | Yes^{A, B, C} | Yes^{A, B} | No |
| 2R,3R-dihydroxybutyrate | No | No | Yes^{A, B} |
| glycerol 3-phosphate | Yes^{A, B} | Yes^{A} | Yes |
| 5-aminoimidazole-4- | No | No | |
| carboxamide | | | Yes^{A, B, C} |
| Hypoxanthine | Yes^{A, B, C} | Yes^{A, B} | No |
| Guanine | Yes^{A, B, C} | Yes^{A, B} | No |
| Orotate | Yes^{A, B, C} | Yes^{A, B, C} | No |
| Orotidine | No | Yes^{A} | No |
| 5,6-dihydrouridine | No | No | Yes^{A, B, C} |
| 3-dehydroshikimate | Yes^{A, B, C} | Yes^{A, B, C} | No |
| Indolactate | Yes^{A, B, C} | Yes^{A, B, C} | Yes^{A, B, C} |
| Indoleacetate | Yes^{A} | Yes^{A, B} | Yes^{A, B} |
| 1-kestose | Yes^{A, B, C} | Yes^{A, B, C} | Yes^{A, B, C} |
| Thioproline | Yes^{A, B, C} | Yes^{A, B, C} | Yes^{A, B, C} |
| N-acetylaspartate (NAA) | Yes^{A} | No | Yes^{A} |
| Glutamine | Yes^{A, B, C} | Yes^{A, B, C} | Yes^{A, B, C} |
| Cysteine | Yes^{A, B, C} | Yes^{A, B, C} | Yes^{A, B, C} |
| Pyridoxamine | No | No | Yes^{A} |
| Pyridoxamine phosphate | No | No | Yes^{A} |
| 5-aminoimidazole-4- | No | No | Yes^{A, B, C} |
| carboxamide | | | |
| Tricarballylate | No | No | Yes |

^{A}metabolite is at least 2 fold greater than media control;
^{B}metabolite is at least 3 fold greater than media control;
^{C}metabolite is at least 5 fold greater than media control.

[0267] Strains ELA191024, ELA191036, and ELA191105 are cultured individually in minimal media and rich media, and the supernatants are analyzed for secreted metabolites. Table 11 provides an exemplary list of metabolites uniquely secreted by each strain. Unless otherwise noted, the listed metabolite in the media is at least 1.5 fold greater than the other two strains.

TABLE 11

| ELA191024 | ELA191036 | ELA191105 |
|---|---|---|
| Glutamine | 2-methylserine | betaine^{A} |
| anthranilate^{A} | N-acetylaspartate (NAA)^{A, B} | carboxyethyl-GABA^{A} |
| methionine sulfone | N-acetylasparagine | 3-methylhistidine^{A} |
| 2-hydroxybutyrate/ | N-acetylglutamate^{A, B} | saccharopine |
| 2-hydroxyisobutyrate | | |
| gamma- | N-acetylglutamine^{A} | pipecolate |
| glutamylphenylalanine^{A, B} | | |
| gamma-glutamyltyrosine^{A, B} | 2-pyrrolidinoneA | N,N-dimethyl-5- |
| | | aminovalerate^{A, B} |
| azelate (C9-DC) | S-1-pyrroline-5- | N-butyryl-phenylalanine^{A} |
| | carboxylate | |
| 5-aminoimidazole-4- | trans-urocanate^{A, B, C} | tryptophan^{A} |
| carboxamide | | |
| AMP^{A} | cis-urocanate^{A, B, C} | N-butyryl-leucine |
| adenosine-2′,3′-cyclic | formiminoglutamate^{A, B, C} | 2-hydroxy-4- |
| monophosphate | | (methylthio)butanoic acid^{A} |
| adenosine^{A} | 4-imidazoleacetate | S-methylcysteine^{A} |
| adenine^{A} | N6-acetyllysine | ornithine |
| uridine-2′,3′-cyclic | N-acetylphenylalanine^{A} | N-methylproline^{A} |
| monophosphate | | |
| cytidine 2′,3′-cyclic | phenylpyruvate^{A} | N,N,N-trimethyl-alanylproline |
| monophosphate^{A} | | betaine (TMAP)^{A} |
| (3′-5′)-uridylyladenosine^{A} | phenethylamine | N-monomethylarginine^{A} |
| nicotinamide | | |
| ribonucleotide (NMN)^{A, B} | N-acetyltyrosine^{A} | guanidinoacetate |
| 1-kestose^{A} | tyramine | putrescine |
| homocystine ^{R, A} | 4-hydroxyphenylpyruvate^{A, B} | cysteinylglycine^{A, B, C} |
| N-acetylcitrulline ^{R, A, B, C} | 3-methoxytyramine^{A} | cyclo(gly-phe) |
| alpha-ketoglutarate ^{R} | 5-hydroxymethyl-2-furoic | tryptophylglycine |
| | acid^{A} | |
| succinate ^{R, A, B} | N-acetylleucine | pyruvate^{A, B} |
| 5-hydroxyhexanoate ^{R} | isovalerate (C5)^{A, B} | mannose |
| inositol 1-phosphate (I1P) ^{R} | N-acetylisoleucine^{A, B, C} | N-acetylmuramate^{A} |
| N6-methyladenosine ^{R} | 3-methyl-2-oxovalerate | eicosenamide (20:1)^{A, B, C} |
| 2′-O-methyladenosine ^{R} | 2-hydroxy-3- | deoxycarnitine^{A} |
| | methylvalerate | |
| guanine ^{R, A} | methylsuccinate^{A} | 2S,3R-dihydroxybutyrate |
| 5,6-dihydrouridine ^{R} | N-acetylvaline^{A, B, C} | chiro-inositol^{A, B} |
| nicotinamide | 3-methyl-2-oxobutyrate^{A} | choline |
| ribonucleotide (NMN) ^{R} | | |
| 3-dehydroshikimate ^{R, A} | N-acetylmethionine | glycerophosphorylcholine |
| | | (GPC)^{A} |
| 4-hydroxybenzyl alcohol ^{R} | N-acetylmethionine | 1-palmitoyl-GPE (16:0)^{A} |
| | sulfoxide^{A} | |
| quinate ^{R} | S-adenosylmethionine | 1-linoleoylglycerol (18:2) |
| | (SAM)^{A, B} | |
| | homocystine^{A, B} | 3-hydroxy-3-methylglutarate |
| | N-acetylarginine | 3-ureidopropionate |
| | N-acetylcitrulline^{A, B, C} | (3′-5′)-uridylyluridine |
| | N-acetylproline^{A} | nicotinamide riboside |
| | N-alpha-acetylornithine | trigonelline (N′- |
| | | methylnicotinate) |
| | hydroxyproline | oxalate (ethanedioate)^{A} |
| | acetylagmatine^{A} | pyridoxine (Vitamin B6) |
| | spermidine^{A, B} | maltol |
| | (N(1) + N(8)- | histidine betaine (hercynine) |
| | acetylspermidine^{A} | |
| | spermine^{A} | 2,6-dihydroxybenzoic acid |
| | 5-methylthioadenosine | pentose acid |
| | (MTA)^{A, B} | |
| | 4-acetamidobutanoate^{A, B, C} | N-acetylserine ^{R, A} |
| | 3-phosphoglycerate^{A} | N-acetylthreonine ^{R} |
| | phosphoenolpyruvate | N-acetylglutamine ^{R, A} |
| | (PEP)^{A, B, C} | |
| | sedoheptulose-7- | 1-methylhistidine ^{R, A, B} |
| | phosphate | |
| | sedoheptulose | N-acetylhistidine ^{R, A} |
| | sucrose | trans-urocanate ^{R, A} |
| | glucuronate^{A} | N6-acetyllysine ^{R} |
| | N-acetyl- | N-acetyl-cadaverine ^{R, A, B} |
| | glucosamine 1- | |
| | phosphate^{A, B} | |
| | N-acetylglucosamine/N- | N-acetylphenylalanine ^{R, A} |
| | acetylgalactosamine^{A} | |
| | citraconate/glutaconate^{A, B, C} | phenyllactate (PLA) ^{R, A} |
| | butyrate/isobutyrate (4:0)^{A, B} | 3-(4-hydroxyphenyl)lactate |
| | | (HPLA) ^{R, A, B} |
| | 2-hydroxyglutarate | isovalerate (C5) ^{R, A, B} |
| | 5-dodecenoylcarnitine | N-acetylisoleucine ^{R, A, B, C} |
| | (C12:1)^{A} | |
| | 3-hydroxyoctanoate | N-acetylvaline ^{R, A} |
| | 5-hydroxyhexanoate | N-acetylmethionine ^{R} |
| | 1-stearoyl-GPE (18:0) | S-adenosylmethionine (SAM) ^{R} |
| | | 2-hydroxy-4-(methylthio)butanoic |
| | | acid ^{R} |
| | glycerol 3-phosphate | |
| | xanthine | S-methylcysteine ^{R, A} |
| | xanthosine | N-acetylarginine ^{R} |
| | 1-methyladenine^{A} | acetylagmatine ^{R, A} |
| | N6-methyladenosine | glutathione, oxidized (GSSG) ^{R, A} |
| | guanosine | 2-hydroxybutyrate/2- |
| | | hydroxyisobutyrate ^{R, A} |
| | 7-methylguanine^{A} | gamma-glutamylhistidine ^{R, A} |
| | N-carbamoylaspartate | glucuronate |
| | orotidine | aconitate [cis or trans] ^{R} |
| | pseudouridine | 2-methylcitrate ^{R} |
| | 5,6-dihydrouridine | 2R,3R-dihydroxybutyrate ^{R, A, B} |
| | 5-methylcytidine | 5-aminoimidazole-4- |
| | | carboxamide ^{R, A, B, C} |
| | thymine | N-carbamoylaspartate ^{R, A} |
| | nicotinate^{A} | dihydroorotate ^{R} |
| | nicotinate | orotidine ^{R, A, B, C} |
| | ribonucleoside^{A, B} | |
| | pantothenate (Vitamin | thymine ^{R, A, B} |
| | B5) | |
| | pterin^{A} | (3′-5′)-adenylylguanosine ^{R, A, B, C} |
| | benzoate | nicotinamide riboside ^{R} |
| | 3-dehydroshikimate^{A} | NAD+ ^{R, A} |
| | 2-isopropylmalate^{A, B, C} | Pyridoxamine |
| | 4-hydroxybenzyl alcohol | pyridoxamine phosphate^{A} |
| | 2,4-di-tert-butylphenol | homocitrate |
| | 1-linoleoylglycerol (18:2) | |
| | R,A | |
| | guanosine 3′- | |
| | monophosphate (3′- | |
| | GMP) ^{R} | |
| | guanosine-2′,3′-cyclic | |
| | monophosphate ^{R, A} | |
| | cytidine 2′,3′-cyclic | |
| | monophosphate ^{R} | |

^{R} metabolite secreted when grown in rich media;
^{A}metabolite is at least 2 fold greater than the two other strains;
^{B}metabolite is at least 3 fold greater than the two other strains;
^{C}metabolite is at least 5 fold greater than the two other strains.

[0268] Strains ELA191024 and ELA191036 are co-cultured in minimal media and rich media, and the supernatant is analyzed for secreted metabolites. Table 12 lists unique metabolites secreted by the consortium. Unless otherwise noted, the metabolite is secreted in minimal media and the amount in the media is at least 1.5 fold greater than strains grown individually.

TABLE 12

| | | |
|---|---|---|
| histidine | Pyruvate^{A, B} | (3′-5′)-cytidylyladenosine^{A, B} |
| N-acetylhistidine^{A} | Sucrose^{A, B} | (3′-5′)-cytidylylcytidine^{A} |
| phenyllactate (PLA)^{A, B} | Fumarate | (3′-5′)-cytidylyluridine^{A, B} |
| 1-carboxyethyltyrosine | Deoxycarnitine^{A} | (3′-5′)-guanylylcytidine |
| 3-(4-hydroxyphenyl) | 2R,3R-dihydroxybutyrate^{A} | (3′-5′)-guanylyluridine^{A, B, C} |
| lactate (HPLA)^{A, B} | | |
| Tryptophan^{A} | chiro-inositol^{A} | (3′-5′)-uridylylcytidine^{A, B, C} |
| N-acetyltryptophan^{A} | glycerophosphorylcholine | (3′-5′)-uridylyluridine^{A, B} |
| | (GPC)^{A, B} | |
| Anthranilate^{A, B} | 5-aminoimidazole-4- | (3′-5′)-uridylyladenosine^{A} |
| | carboxamide^{A, B, C} | |
| Indolelactate | Xanthine^{A} | NAD+^{A, B, C} |
| Isovalerylglycine | AMP^{A, B, C} | oxalate (ethanedioate) ^{A} |
| N-acetylisoleucine | 2′-deoxyadenosine^{A} | maltol |
| N-acetylmethionine | dihydroorotate | 1-methylhistidine^{R, A, B} |
| Urea | UMP^{A, B, C} | N6,N6-dimethyllysine^{R} |
| Ornithine^{A} | urinde | S-methylcysteine^{R} |
| Spermidine^{A} | CMP^{A, B, C} | 2-methylcitrate^{R} |
| Spermine^{A, B} | cytidine^{A} | |
| Cysteinylglycine^{A} | (3′-5′)-adenylyluridine^{A, B, C} | |

^{R}metabolite secreted when grown in rich media;
^{A}metabolite is at least 2 fold greater than the two strains grown individually;
^{B}metabolite is at least 3 fold greater than the two strains grown individually;
^{C}metabolite is at least 5 fold greater than the two strains grown individually.

[0269] Strains ELA191024, ELA191036, and ELA191105 are co-cultured and the supernatant is analyzed for secreted metabolites. Table 13 lists unique metabolites secreted by the consortium. Unless otherwise noted, the metabolite is secreted in minimal media and is at least 1.5 fold greater than strains grown individually.

TABLE 13

| | | |
|---|---|---|
| N-carbamoylserine^{A} | Isobar: hexose diphosphates | N6-succinyladenosine |
| beta-citrylglutamate | ribitol | guanosine 2′-monophosphate |
| | | (2′-GMP |
| N6-methyllysine | arabonate/xylonate | 2′-O-methyluridine |
| N6,N6-dimethyllysine^{A} | ribulonate/xylulonate/lyxonate | uridine 2′-monophosphate (2′- |
| | | UMP)^{A} |
| N6,N6,N6- | fructose^{A} | 5-methylcytosine^{A} |
| trimethyllysine | | |
| Saccharopine | galactonate^{A} | pantoate |
| cadaverine | isocitric lactone | pantothenate (Vitamin B5) |
| N-succinyl-phenylalanine | fumarate^{A, B} | glucarate (saccharate)^{A} |
| 2-hydroxyphenylacetate | malate^{A, B} | Hippurate |
| 3-(4-hydroxyphenyl) | 3-hydroxyhexanoate | histidinol |
| lactate (HPLA) | | |
| N-acetyltryptophan | 5-hydroxyhexanoate | homocitrate^{A} |
| indolelactate^{A} | myo-inositol^{A} | pyrraline^{A} |
| N-acetylleucine | chiro-inositol | 2-keto-3-deoxy-gluconate |
| 4-methyl-2- | glycerophosphoethanolamine | pentose acid |
| oxopentanoate | | |
| homocitrulline^{A} | glycerophosphoinositol | N,N-dimethylalanine |
| dimethylarginine (ADMA + | 3-hydroxy-3-methylglutarate | Isobar: hexose diphosp |
| SDMA) | | |
| N-monomethylarginine | Mevalonate^{A} | 2-methylcitrate^{R} |
| guanidinoacetate | 5-aminoimidazole-4- | (3′-5′)-adenylylguanosine^{R} |
| | carboxamide^{A} | |
| N(1)-acetylspermine^{A} | 2′-AMP | |
| glucose 6-phosphate^{A, B} | 2′-O-methyladenosine | |

^{R}metabolite secreted when grown in rich media;
* secreted in both minimal media and rich media;
^{A}metabolite is at least 2 fold greater than the three strains grown individually;
^{B}metabolite is at least 3 fold greater than the three strains grown individually;
^{C}metabolite is at least 5 fold greater than the three strains grown individually.

### Example 11. In Vivo Evaluation of Bacterial Strains

[0270] Strain ELA191024 is administered to broiler chickens at a dose of approximately 1.5×10⁵ CFU/g of feed. Control: n=30 pens (1,500 total birds); Test: B. amyloliquefaciens strain ELA191024: n=20 pens (1,000 total birds). Starter feed is administered until day 12, 10 grower feed is administered until day 25, finisher feed is administered until day 42. ELA191024 is present at all feed stages.

[0271] In broiler chickens, the following was observed: increase in body weight by 3.5%; increase in production efficiency (European Broiler Index, EBI) by 6.2%; and improvement in feed conversion by 3.3%. See FIG. 4.

[0272] ELA191024, ELA191036, and ELA191105 are administered individually and in combination to poultry and gut permeability is measured.

[0273] ELA191024, ELA191036, and ELA191105 are administered individually and in combination to poultry and feed conversion ratio is measured.

[0274] ELA191024, ELA191036, and ELA191105 are administered individually and in combination to poultry and structure and function of poultry GIT microbiome is analyzed.

[0275] ELA191024, ELA191036, and ELA191105 are administered individually and in combination to poultry and mortality rate is measured.

[0276] ELA191024, ELA191036, and ELA191105 are administered individually and in combination to poultry and the number of pathogen-associated lesion is measured.

[0277] ELA191024, ELA191036, and ELA191105 are administered individually and in combination to poultry and pathogens load (C. Perfringens, APEC and Salmonella) in poultry GIT is measured.

[0278] ELA191024, ELA191036, and ELA191105 are administered individually and in combination to poultry and expression of tight junction proteins is measured.

[0279] ELA191024, ELA191036, and ELA191105 are administered individually and in combination to poultry and pro-inflammatory/anti-inflammatory cytokines level is measured.

[0280] ELA191024, ELA191036, and ELA191105 are administered individually and in combination to poultry and gut permeability is measured.

[0281] ELA191024, ELA191036, and ELA191105 are administered individually and in combination to swine and gut permeability is measured.

[0282] The 16S rRNA sequences of each of the ELA191024, ELA191036, and ELA191105 bacteria strains are provided below:

Full 16S-rRNA sequences
>Bacillus amyloliquefaciens ELA191024
(BAMY_00429)
(SEQ ID NO: 17)
TCGGAGAGTTTGATCCTGGCTCAGGACGAACGCTGGCGGCGTGCCTAAT
ACATGCAAGTCGAGCGGACAGATGGGAGCTTGCTCCCTGATGTTAGCGG
CGGACGGGTGAGTAACACGTGGGTAACCTGCCTGTAAGACTGGGATAAC
TCCGGGAAACCGGGGCTAATACCGGATGGTTGTCTGAACCGCATGGTTC
AGACATAAAAGGTGGCTTCGGCTACCACTTACAGATGGACCCGCGGCGC
ATTAGCTAGTTGGTGAGGTAACGGCTCACCAAGGCGACGATGCGTAGCC
GACCTGAGAGGGTGATCGGCCACACTGGGACTGAGACACGGCCCAGACT
CCTACGGGAGGCAGCAGTAGGGAATCTTCCGCAATGGACGAAAGTCTGA
CGGAGCAACGCCGCGTGAGTGATGAAGGTTTTCGGATCGTAAAGCTCTG
TTGTTAGGGAAGAACAAGTGCCGTTCAAATAGGGCGGCACCTTGACGGT
ACCTAACCAGAAAGCCACGGCTAACTACGTGCCAGCAGCCGCGGTAATA
CGTAGGTGGCAAGCGTTGTCCGGAATTATTGGGCGTAAAGGGCTCGCAG
GCGGTTTCTTAAGTCTGATGTGAAAGCCCCCGGCTCAACCGGGGAGGGT
CATTGGAAACTGGGGAACTTGAGTGCAGAAGAGGAGAGTGGAATTCCAC
GTGTAGCGGTGAAATGCGTAGAGATGTGGAGGAACACCAGTGGCGAAGG
CGACTCTCTGGTCTGTAACTGACGCTGAGGAGCGAAAGCGTGGGGAGCG
AACAGGATTAGATACCCTGGTAGTCCACGCCGTAAACGATGAGTGCTAA
GTGTTAGGGGGTTTCCGCCCCTTAGTGCTGCAGCTAACGCATTAAGCAC
TCCGCCTGGGGAGTACGGTCGCAAGACTGAAACTCAAAGGAATTGACGG
GGGCCCGCACAAGCGGTGGAGCATGTGGTTTAATTCGAAGCAACGCGAA
GAACCTTACCAGGTCTTGACATCCTCTGACAATCCTAGAGATAGGACGT
CCCCTTCGGGGGCAGAGTGACAGGTGGTGCATGGTTGTCGTCAGCTCGT
GTCGTGAGATGTTGGGTTAAGTCCCGCAACGAGCGCAACCCTTGATCTT
AGTTGCCAGCATTCAGTTGGGCACTCTAAGGTGACTGCCGGTGACAAAC
CGGAGGAAGGTGGGGATGACGTCAAATCATCATGCCCCTTATGACCTGG
GCTACACACGTGCTACAATGGACAGAACAAAGGGCAGCGAAACCGCGAG
GTTAAGCCAATCCCACAAATCTGTTCTCAGTTCGGATCGCAGTCTGCAA
CTCGACTGCGTGAAGCTGGAATCGCTAGTAATCGCGGATCAGCATGCCG
CGGTGAATACGTTCCCGGGCCTTGTACACACCGCCCGTCACACCACGAG
AGTTTGTAACACCCGAAGTCGGTGAGGTAACCTTTATGGAGCCAGCCGC
CGAAGGTGGGACAGATGATTGGGGTGAAGTCGTAACAAGGTAGCCGTAT
CGGAAGGTGCGGCTGGATCACCTCCTTT
>Bacillus amyloliquefaciens ELA191036(BAMY_00854)
(SEQ ID NO: 18)
tcggagagtttgatcctggctcaggacgaacgctggcggcgtgcctaat
acatgcaagtcgagcggacagatgggagcttgctccctgatgttagcgg
cggacgggtgagtaacacgtgggtaacctgcctgtaagactgggataac
tccgggaaaccggggctaataccggatggttgtctgaaccgcatggttc
agacataaaaggtggcttcggctaccacttacagatggacccgcggcgc
attagctagttggtgaggtaacggctcaccaaggcgacgatgcgtagcc
gacctgagagggtgatcggccacactgggactgagacacggcccagact
cctacgggaggcagcagtagggaatcttccgcaatggacgaaagtctga
cggagcaacgccgcgtgagtgatgaaggttttcggatcgtaaagctctg
ttgttagggaagaacaagtgccgttcaaatagggcggcaccttgacggt
acctaaccagaaagccacggctaactacgtgccagcagccgcggtaata
cgtaggtggcaagcgttgtccggaattattgggcgtaaagggctcgcag
gcggtttcttaagtctgatgtgaaagcccccggctcaaccggggagggt
cattggaaactggggaacttgagtgcagaagaggagagtggaattccac
gtgtagcggtgaaatgcgtagagatgtggaggaacaccagtggcgaagg
cgactctctggtctgtaactgacgctgaggagcgaaagcgtggggagcg
aacaggattagataccctggtagtccacgccgtaaacgatgagtgctaa
gtgttagggggtttccgccccttagtgctgcagctaacgcattaagcac
tccgcctggggagtacggtcgcaagactgaaactcaaaggaattgacgg
gggcccgcacaagcggtggagcatgtggtttaattcgaagcaacgcgaa
gaaccttaccaggtcttgacatcctctgacaatcctagagataggacgt
ccccttcgggggcagagtgacaggtggtgcatggttgtcgtcagctcgt
gtcgtgagatgttgggttaagtcccgcaacgagcgcaacccttgatctt
agttgccagcattcagttgggcactctaaggtgactgccggtgacaaac
cggaggaaggtggggatgacgtcaaatcatcatgccccttatgacctgg
gctacacacgtgctacaatggacagaacaaagggcagcgaaaccgcgag
gttaagccaatcccacaaatctgttctcagttcggatcgcagtctgcaa
ctcgactgcgtgaagctggaatcgctagtaatcgcggatcagcatgccg
cggtgaatacgttcccgggccttgtacacaccgcccgtcacaccacgag
agtttgtaacacccgaagtcggtgaggtaacctttatggagccagccgc
cgaaggtgggacagatgattggggtgaagtcgtaacaaggtagccgtat
cggaaggtgcggctggatcacctccttt
>Bacillus subtilis ELA191105 (BSUB_00009)
(SEQ ID NO: 19)
tcggagagtttgatcctggctcaggacgaacgctggcggcgtgcctaat
acatgcaagtcgagcggacagatgggagcttgctccctgatgttagcgg
cggacgggtgagtaacacgtgggtaacctgcctgtaagactgggataac
tccgggaaaccggggctaataccggatggttgtttgaaccgcatggttc
aaacataaaaggtggcttcggctaccacttacagatggacccgcggcgc
attagctagttggtgaggtaacggctcaccaaggcaacgatgcgtagcc
gacctgagagggtgatcggccacactgggactgaggcacggcccagact
cctacgggaggcagcagtagggaatcttccgcaatggacgaaagtctga
cggagcaacgccgcgtgagtgatgaaggttttcggatcgtaaagctctg
ttgttagggaagaacaagtaccgttcgaatagggcggtaccttgacggt
acctaaccagaaagccacggctaactacgtgccagcagccgcggtaata
cgtaggtggcaagcgttgtccggaattattgggcgtaaagggctcgcag
gcggtttcttaagtctgatgtgaaagcccccggctcaaccggggagggt
cattggaaactggggaacttgagtgcagaagaggagagtggaattccac
gtgtagcggtgaaatgcgtagagatgtggaggaacaccagtggcgaagg
cgactctctggtctgtaactgacgctgaggagcgaaagcgtggggagcg
aacaggattagataccctggtagtccacgccgtaaacgatgagtgctaa
gtgttagggggtttccgccccttagtgctgcagctaacgcattaagcac
tccgcctggggagtacggtcgcaagactgaaactcaaaggaattgacgg
gggcccgcacaagcggtggagcatgtggtttaattcgaagcaacgcgaa
gaaccttaccaggtcttgacatcctctgacaatcctagagataggacgt
ccccttcgggggcagagtgacaggtggtgcatggttgtcgtcagctcgt
gtcgtgagatgttgggttaagtcccgcaacgagcgcaacccttgatctt
agttgccagcattcagttgggcactctaaggtgactgccggtgacaaac
cggaggaaggtggggatgacgtcaaatcatcatgccccttatgacctgg
gctacacacgtgctacaatggacagaacaaagggcagcgaaaccgcgag
gttaagccaatcccacaaatctgttctcagttcggatcgcagtctgcaa
ctcgactgcgtgaagctggaatcgctagtaatcgcggatcagcatgccg
cggtgaatacgttcccgggccttgtacacaccgcccgtcacaccacgag
agtttgtaacacccgaagtcggtgaggtaaccttttaggagccagccgc
cgaaggtgggacagatgattggggtgaagtcgtaacaaggtagccgtat
cggaaggtgcggctggatcacctccttt

### Example 12. Metabolite Analysis

[0283] Tables 14 and 15; show the raw data summarized in Tables 7-13. The amount of metabolite is compared against the media control. A value greater than one indicates the metabolite is secreted. A value less than one indicates the metabolite is consumed. A value equal to one indicates that the metabolite is not consumed or secreted.

TABLE 14
Minimal media

| metabolite | 24 | 36 | 105 | 24-36 | 24-36-105 |
|---|---|---|---|---|---|
| betaine | 42.85 | 17.85 | 99.69 | 5.77 | 19.38 |
| N-carbamoylserine | 1.00 | 1.00 | 1.00 | 1.00 | 2.61 |
| 2-methylserine | 11.03 | 18.19 | 11.95 | 8.55 | 17.26 |
| N-acetylaspartate (NAA) | 1.20 | 9.09 | 2.95 | 8.78 | 2.38 |
| N-acetylasparagine | 4.09 | 10.16 | 6.73 | 7.26 | 10.89 |
| glutamine | 2.55 | 1.00 | 1.59 | 1.22 | 1.00 |
| N-acetylglutamate | 1.00 | 3.56 | 1.35 | 2.19 | 2.99 |
| N-acetylglutamine | 1.80 | 13.40 | 3.15 | 8.39 | 10.33 |
| beta-citrylglutamate | 1.00 | 1.70 | 1.61 | 1.64 | 2.61 |
| carboxyethyl-GABA | 1.00 | 1.02 | 2.27 | 1.09 | 2.39 |
| 2-pyrrolidinone | 1.29 | 8.95 | 2.99 | 1.53 | 8.81 |
| S-1-pyrroline-5-carboxylate | 2.30 | 12.67 | 6.39 | 1.42 | 15.03 |
| histidine | 0.99 | 1.14 | 1.34 | 1.72 | 1.63 |
| 3-methylhistidine | 1.00 | 1.54 | 3.74 | 1.05 | 4.79 |
| N-acetylhistidine | 11.78 | 23.04 | 17.91 | 58.18 | 27.34 |
| trans-urocanate | 12.34 | 728.77 | 35.53 | 301.42 | 461.12 |
| cis-urocanate | 2.46 | 66.07 | 3.76 | 27.58 | 35.48 |
| formiminoglutamate | 0.86 | 60.31 | 2.32 | 20.43 | 31.96 |
| 4-imidazoleacetate | 1.91 | 5.20 | 3.17 | 3.43 | 4.71 |
| N6-acetyllysine | 19.48 | 31.23 | 18.68 | 23.89 | 28.79 |
| N6-methyllysine | 1.00 | 1.32 | 1.00 | 1.19 | 2.20 |
| N6,N6-dimethyllysine | 1.00 | 1.00 | 1.00 | 1.00 | 2.03 |
| N6,N6,N6-trimethyllysine | 1.00 | 2.42 | 1.94 | 1.34 | 3.66 |
| saccharopine | 1.00 | 1.82 | 3.03 | 1.00 | 4.85 |
| pipecolate | 6.27 | 8.50 | 13.13 | 9.16 | 17.89 |
| cadaverine | 1.00 | 1.00 | 1.00 | 1.00 | 1.50 |
| N,N-dimethyl-5- | 1.53 | 1.00 | 5.77 | 1.34 | 3.66 |
| aminovalerate | | | | | |
| N-acetylphenylalanine | 8.40 | 42.61 | 15.96 | 56.59 | 39.63 |
| N-succinyl-phenylalanine | 1.14 | 2.95 | 2.54 | 1.00 | 5.37 |
| N-butyryl-phenylalanine | 1.03 | 1.02 | 2.13 | 1.00 | 2.53 |
| phenylpyruvate | 2.88 | 10.20 | 3.69 | 4.64 | 8.40 |
| phenyllactate (PLA) | 25.19 | 24.96 | 35.43 | 88.77 | 49.75 |
| phenethylamine | 1.00 | 2.03 | 1.35 | 1.72 | 2.15 |
| 2-hydroxyphenylacetate | 1.23 | 1.00 | 1.43 | 1.00 | 2.24 |
| N-acetyltyrosine | 3.58 | 19.24 | 6.83 | 22.72 | 21.10 |
| 1-carboxyethyltyrosine | 4.06 | 2.68 | 4.05 | 6.47 | 3.34 |
| tyramine | 1.00 | 1.68 | 1.00 | 1.00 | 1.38 |
| 4-hydroxyphenylpyruvate | 1.89 | 14.25 | 4.45 | 2.74 | 19.60 |
| 3-(4-hydroxyphenyl)lactate | 7.77 | 11.47 | 12.35 | 34.89 | 20.96 |
| (HPLA) | | | | | |
| 3-methoxytyramine | 1.63 | 5.66 | 2.33 | 1.08 | 4.51 |
| 5-hydroxymethyl-2-furoic | 1.00 | 2.46 | 1.00 | 2.59 | 1.77 |
| acid | | | | | |
| tryptophan | 13.07 | 4.41 | 33.67 | 36.52 | 44.33 |
| N-acetyltryptophan | 1.11 | 1.45 | 1.00 | 3.02 | 2.18 |
| anthranilate | 2.59 | 1.00 | 1.00 | 12.73 | 1.00 |
| indolelactate | 1.00 | 1.44 | 1.55 | 2.82 | 3.72 |
| N-acetylleucine | 9.75 | 28.19 | 16.75 | 25.72 | 53.85 |
| N-butyryl-leucine | 1.00 | 1.24 | 2.21 | 1.26 | 2.75 |
| 4-methyl-2-oxopentanoate | 0.78 | 1.43 | 1.36 | 1.21 | 2.49 |
| isovalerate (C5) | 1.00 | 10.27 | 2.28 | 3.97 | 8.31 |
| isovalerylglycine | 2.04 | 1.71 | 2.52 | 4.00 | 3.18 |
| N-acetylisoleucine | 2.28 | 28.43 | 5.53 | 49.36 | 21.51 |
| 3-methyl-2-oxovalerate | 1.09 | 2.92 | 1.61 | 2.05 | 3.17 |
| 2-hydroxy-3-methylvalerate | 1.41 | 6.18 | 3.69 | 1.37 | 4.76 |
| methylsuccinate | 1.42 | 3.09 | 1.50 | 1.75 | 2.21 |
| N-acetylvaline | 11.76 | 149.64 | 29.69 | 82.24 | 120.94 |
| 3-methyl-2-oxobutyrate | 2.43 | 18.07 | 6.91 | 7.08 | 18.81 |
| N-acetylmethionine | 4.16 | 10.93 | 6.14 | 17.10 | 13.13 |
| methionine sulfone | 5.03 | 3.32 | 2.41 | 1.00 | 3.34 |
| N-acetylmethionine | 74.64 | 277.47 | 129.93 | 195.98 | 310.98 |
| sulfoxide | | | | | |
| S-adenosylmethionine | 1.00 | 4.40 | 1.05 | 2.13 | 3.91 |
| (SAM) | | | | | |
| 2-hydroxy-4- | 1.23 | 1.62 | 3.84 | 2.39 | 2.05 |
| (methylthio)butanoic acid | | | | | |
| homocystine | 25.59 | 212.46 | 47.12 | 5.63 | 153.33 |
| S-methylcysteine | 1.00 | 1.00 | 2.59 | 1.00 | 1.00 |
| urea | 1.05 | 1.90 | 1.84 | 3.40 | 2.82 |
| ornithine | 19.18 | 17.31 | 36.60 | 46.68 | 43.64 |
| homocitrulline | 1.00 | 1.00 | 1.00 | 1.00 | 2.58 |
| dimethylarginine (ADMA + | 1.00 | 1.76 | 2.01 | 1.45 | 4.02 |
| SDMA) | | | | | |
| N-acetylarginine | 64.36 | 190.44 | 99.50 | 112.58 | 179.73 |
| N-acetylcitrulline | 5.73 | 45.01 | 8.72 | 7.47 | 32.73 |
| N-acetylproline | 2.92 | 14.14 | 5.25 | 5.58 | 13.41 |
| N-alpha-acetylornithine | 3.05 | 8.14 | 4.07 | 6.65 | 5.69 |
| hydroxyproline | 1.49 | 3.51 | 1.98 | 2.32 | 4.70 |
| N-methylproline | 1.00 | 1.00 | 2.68 | 1.00 | 1.00 |
| N,N,N-trimethyl- | 1.00 | 1.47 | 3.60 | 1.14 | 4.39 |
| alanylproline betaine | | | | | |
| (TMAP) | | | | | |
| N-monomethylarginine | 1.00 | 1.00 | 2.40 | 1.27 | 4.60 |
| guanidinoacetate | 1.77 | 1.00 | 3.04 | 1.70 | 5.80 |
| acetylagmatine | 1.00 | 2.48 | 1.00 | 1.83 | 2.79 |
| putrescine | 1.34 | 1.00 | 2.42 | 1.00 | 2.57 |
| spermidine | 59.18 | 327.34 | 140.39 | 655.03 | 198.97 |
| (N(1) + N(8))- | 1.00 | 3.89 | 1.77 | 1.74 | 3.70 |
| acetylspermidine | | | | | |
| spermine | 1.00 | 4.06 | 1.00 | 12.80 | 1.97 |
| N(1)-acetylspermine | 1.00 | 1.00 | 1.00 | 1.00 | 2.60 |
| 5-methylthioadenosine | 6.82 | 32.89 | 9.65 | 19.21 | 26.07 |
| (MTA) | | | | | |
| 4-acetamidobutanoate | 1.00 | 196.74 | 38.06 | 1.70 | 180.74 |
| cysteinylglycine | 1.45 | 1.31 | 10.49 | 4.22 | 11.64 |
| 2-hydroxybutyrate/2- | 34.22 | 7.31 | 22.58 | 40.52 | 10.09 |
| hydroxyisobutyrate | | | | | |
| gamma- | 3.21 | 0.25 | 0.89 | 0.25 | 0.25 |
| glutamylphenylalanine | | | | | |
| gamma-glutamyltyrosine | 4.57 | 1.00 | 1.11 | 1.00 | 1.00 |
| cyclo(gly-phe) | 1.00 | 1.37 | 2.35 | 1.25 | 3.38 |
| tryptophylglycine | 1.33 | 1.00 | 2.46 | 1.34 | 1.00 |
| glucose 6-phosphate | 1.00 | 1.00 | 1.00 | 1.00 | 3.66 |
| Isobar: hexose diphosphates | 1.87 | 3.69 | 3.90 | 5.18 | 7.73 |
| 3-phosphoglycerate | 2.14 | 7.08 | 3.25 | 3.14 | 8.82 |
| phosphoenolpyruvate (PEP) | 1.00 | 7.68 | 1.00 | 1.00 | 3.34 |
| pyruvate | 1.16 | 0.93 | 4.47 | 4.26 | 6.08 |
| sedoheptulose-7-phosphate | 1.00 | 1.65 | 1.00 | 1.00 | 2.26 |
| ribitol | 1.00 | 1.38 | 1.45 | 1.44 | 2.58 |
| arabonate/xylonate | 2.52 | 3.31 | 4.06 | 2.77 | 7.08 |
| sedoheptulose | 1.72 | 3.15 | 1.59 | 1.31 | 2.50 |
| ribulonate/xylulonate/lyxon | 1.00 | 1.29 | 1.79 | 1.07 | 2.82 |
| ate | | | | | |
| sucrose | 1.00 | 2.00 | 1.00 | 8.05 | 1.00 |
| fructose | 0.80 | 0.80 | 0.80 | 0.80 | 1.71 |
| mannose | 1.00 | 1.22 | 2.09 | 1.24 | 2.95 |
| galactonate | 1.00 | 1.77 | 1.60 | 1.00 | 4.00 |
| glucuronate | 1.14 | 2.69 | 1.00 | 2.76 | 3.66 |
| N-acetyl-glucosamine 1- | 1.06 | 3.83 | 1.00 | 1.00 | 4.24 |
| phosphate | | | | | |
| N-acetylmuramate | 3.85 | 67.72 | 143.77 | 34.24 | 22.11 |
| N-acetylglucosamine/N- | 1.39 | 47.92 | 17.62 | 3.78 | 24.02 |
| acetylgalactosamine | | | | | |
| isocitric lactone | 1.01 | 1.22 | 1.79 | 1.00 | 3.18 |
| fumarate | 1.49 | 0.22 | 1.84 | 2.56 | 8.59 |
| malate | 1.61 | 1.00 | 1.69 | 1.69 | 6.42 |
| citraconate/glutaconate | 2.82 | 15.55 | 3.00 | 3.04 | 5.65 |
| butyrate/isobutyrate (4:0) | 1.00 | 3.82 | 1.13 | 1.00 | 2.20 |
| 2-hydroxyglutarate | 21.36 | 48.58 | 29.25 | 36.99 | 56.55 |
| azelate (C9-DC) | 2.05 | 1.28 | 1.00 | 1.00 | 1.00 |
| eicosenamide (20:1) | 2.51 | 1.53 | 87.84 | 1.44 | 1.56 |
| 5-dodecenoylcarnitine | 5.42 | 194.14 | 70.49 | 1.00 | 84.24 |
| (C12:1) | | | | | |
| deoxycarnitine | 1.00 | 1.00 | 2.96 | 2.89 | 1.00 |
| 3-hydroxyhexanoate | 1.00 | 1.00 | 1.00 | 1.00 | 1.73 |
| 3-hydroxyoctanoate | 1.00 | 1.93 | 1.00 | 1.00 | 1.07 |
| 5-hydroxyhexanoate | 2.83 | 6.36 | 4.09 | 1.00 | 9.87 |
| 2S,3R-dihydroxybutyrate | 9.13 | 9.66 | 15.56 | 9.84 | 22.59 |
| 2R,3R-dihydroxybutyrate | 1.45 | 1.17 | 1.26 | 3.80 | 1.64 |
| myo-inositol | 1.00 | 1.00 | 1.45 | 1.00 | 3.83 |
| chiro-inositol | 1.49 | 1.00 | 4.65 | 3.52 | 14.57 |
| choline | 4.68 | 0.11 | 7.40 | 4.65 | 7.11 |
| glycerophosphorylcholine | 20.00 | 1.00 | 54.14 | 70.57 | 14.57 |
| (GPC) | | | | | |
| glycerophosphoethanolamine | 1.00 | 1.11 | 1.64 | 1.13 | 3.01 |
| glycerophosphoinositol | 1.86 | 1.31 | 1.25 | 1.97 | 3.50 |
| 1-palmitoyl-GPE (16:0) | 1.00 | 41.29 | 107.15 | 1.00 | 20.38 |
| 1-stearoyl-GPE (18:0) | 1.00 | 4.34 | 2.77 | 1.00 | 1.23 |
| glycerol 3-phosphate | 1.48 | 3.74 | 2.43 | 2.37 | 3.77 |
| 1-linoleoylglycerol (18:2) | 1.39 | 1.00 | 2.33 | 1.56 | 1.82 |
| 3-hydroxy-3- | 1.00 | 1.17 | 1.87 | 1.02 | 3.08 |
| methylglutarate | | | | | |
| mevalonate | 1.13 | 1.30 | 1.64 | 1.00 | 3.37 |
| 5-aminoimidazole-4- | 1.91 | 1.00 | 1.00 | 10.87 | 5.07 |
| carboxamide | | | | | |
| xanthine | 9.17 | 29.71 | 16.71 | 69.44 | 21.91 |
| xanthosine | 1.25 | 2.82 | 1.54 | 1.13 | 3.33 |
| AMP | 1.82 | 0.82 | 0.82 | 40.14 | 1.23 |
| 2′-AMP | 1.00 | 1.38 | 1.91 | 1.16 | 3.42 |
| adenosine-2′,3′-cyclic | 2.00 | 1.00 | 1.00 | 1.58 | 1.00 |
| monophosphate | | | | | |
| adenosine | 8.91 | 3.51 | 3.99 | 4.25 | 1.00 |
| adenine | 646.35 | 162.23 | 253.40 | 178.48 | 74.38 |
| 1-methyladenine | 1.00 | 3.62 | 1.77 | 1.55 | 3.72 |
| N6-methyladenosine | 1.00 | 5.32 | 3.19 | 2.32 | 2.83 |
| 2′-O-methyladenosine | 1.98 | 4.28 | 5.64 | 1.38 | 10.39 |
| 2′-deoxyadenosine | 1.00 | 1.00 | 1.00 | 2.58 | 1.00 |
| N6-succinyladenosine | 1.00 | 3.20 | 2.32 | 1.00 | 5.94 |
| guanosine | 7.58 | 18.15 | 11.10 | 23.85 | 6.79 |
| 7-methylguanine | 1.00 | 5.42 | 2.45 | 2.12 | 5.24 |
| guanosine 2′- | 1.00 | 1.71 | 1.88 | 1.49 | 2.84 |
| monophosphate (2′-GMP) | | | | | |
| N-carbamoylaspartate | 1.13 | 1.72 | 1.00 | 1.91 | 1.79 |
| dihydroorotate | 30.78 | 38.31 | 55.53 | 71.39 | 66.37 |
| orotidine | 1.00 | 2.25 | 1.17 | 2.08 | 2.29 |
| UMP | 1.00 | 1.00 | 1.00 | 26.27 | 1.00 |
| uridine-2′,3′-cyclic | 7.79 | 3.00 | 5.03 | 3.50 | 1.00 |
| monophosphate | | | | | |
| uridine | 2.30 | 2.81 | 1.83 | 4.67 | 1.29 |
| pseudouridine | 1.00 | 3.13 | 1.87 | 1.27 | 3.80 |
| 5,6-dihydrouridine | 2.12 | 7.38 | 4.08 | 2.50 | 8.00 |
| 2′-O-methyluridine | 1.00 | 3.80 | 2.73 | 1.13 | 6.46 |
| 3-ureidopropionate | 1.02 | 1.06 | 1.63 | 1.02 | 1.00 |
| uridine 2′-monophosphate | 1.00 | 2.21 | 1.94 | 1.40 | 4.65 |
| (2′-UMP) | | | | | |
| CMP | 1.33 | 1.12 | 1.00 | 79.57 | 1.00 |
| cytidine 2′,3′-cyclic | 5.49 | 1.00 | 2.52 | 1.76 | 1.00 |
| monophosphate | | | | | |
| cytidine | 3.73 | 2.80 | 3.09 | 8.19 | 1.44 |
| 5-methylcytidine | 2.77 | 4.27 | 1.79 | 3.15 | 2.22 |
| 5-methylcytosine | 1.00 | 1.00 | 1.00 | 1.00 | 2.31 |
| thymine | 11.55 | 28.51 | 16.76 | 34.79 | 25.79 |
| (3′-5′)-adenylyluridine | 1.00 | 1.00 | 1.00 | 8.30 | 1.00 |
| (3′-5′)-cytidylyladenosine | 1.00 | 1.00 | 1.00 | 3.93 | 1.00 |
| (3′-5′)-cytidylylcytidine | 1.00 | 1.00 | 1.00 | 2.78 | 1.00 |
| (3′-5′)-cytidylyluridine | 1.00 | 1.00 | 1.00 | 4.91 | 1.00 |
| (3′-5′)-guanylylcytidine | 1.00 | 1.00 | 1.00 | 1.52 | 1.00 |
| (3′-5′)-guanylyluridine | 1.00 | 1.00 | 1.00 | 5.66 | 1.00 |
| (3′-5′)-uridylylcytidine | 1.00 | 1.00 | 1.00 | 5.44 | 1.00 |
| (3′-5′)-uridylyluridine | 1.03 | 1.00 | 2.00 | 4.37 | 2.07 |
| (3′-5′)-uridylyladenosine | 2.24 | 1.00 | 1.00 | 7.72 | 1.00 |
| nicotinate | 8.05 | 159.99 | 68.03 | 1.00 | 101.07 |
| nicotinate ribonucleoside | 3.93 | 70.86 | 19.60 | 6.70 | 45.53 |
| nicotinamide ribonucleotide | 13.26 | 1.05 | 3.60 | 12.81 | 1.00 |
| (NMN) | | | | | |
| nicotinamide riboside | 189.84 | 146.20 | 287.57 | 90.87 | 159.37 |
| NAD+ | 1.00 | 1.00 | 1.00 | 10.42 | 1.00 |
| trigonelline (N′- | 95.10 | 107.30 | 198.70 | 111.80 | 240.20 |
| methylnicotinate) | | | | | |
| pantoate | 61.42 | 166.28 | 130.04 | 89.83 | 273.82 |
| pantothenate (Vitamin B5) | 3.20 | 12.55 | 8.12 | 8.78 | 20.68 |
| glucarate (saccharate) | 1.00 | 1.00 | 1.00 | 1.00 | 2.15 |
| oxalate (ethanedioate) | 1.00 | 1.00 | 2.70 | 2.70 | 1.00 |
| pterin | 2.22 | 10.34 | 3.81 | 8.22 | 8.51 |
| pyridoxine (Vitamin B6) | 1.00 | 1.11 | 2.14 | 1.34 | 3.11 |
| hippurate | 1.33 | 1.84 | 1.81 | 2.22 | 2.79 |
| benzoate | 1.00 | 1.58 | 1.00 | 1.81 | 1.00 |
| maltol | 1.00 | 3.40 | 5.70 | 5.31 | 3.90 |
| 3-dehydroshikimate | 3.20 | 9.64 | 4.19 | 1.00 | 6.54 |
| 1-kestose | 9.66 | 1.14 | 4.30 | 11.61 | 1.00 |
| 2-isopropylmalate | 1.51 | 94.90 | 3.03 | 4.16 | 4.45 |
| 4-hydroxybenzyl alcohol | 1.00 | 1.79 | 1.00 | 1.00 | 1.39 |
| histidine betaine (hercynine) | 1.62 | 1.00 | 2.83 | 2.06 | 4.13 |
| histidinol | 1.00 | 1.00 | 1.33 | 1.00 | 2.28 |
| homocitrate | 1.00 | 1.00 | 1.31 | 1.00 | 3.00 |
| pyrraline | 1.00 | 1.75 | 1.28 | 1.00 | 4.17 |
| 2-keto-3-deoxy-gluconate | 4.05 | 4.38 | 5.56 | 5.07 | 8.80 |
| 2,6-dihydroxybenzoic acid | 1.00 | 1.14 | 2.13 | 1.12 | 2.90 |
| 2,4-di-tert-butylphenol | 1.05 | 2.17 | 1.12 | 1.22 | 1.24 |
| pentose acid | 1.00 | 1.42 | 2.23 | 1.24 | 3.85 |

TABLE 15
Rich media

| metabolite | 24 | 36 | 105 | 24-36 | 24-36-105 |
|---|---|---|---|---|---|
| N-acetylserine | 2.95 | 3.02 | 6.56 | 2.96 | 2.70 |
| N-acetylthreonine | 15.64 | 17.47 | 30.63 | 17.65 | 11.54 |
| N,N-dimethylalanine | 1.20 | 0.91 | 1.18 | 0.82 | 2.01 |
| N-acetylglutamine | 1.93 | 1.68 | 5.52 | 1.89 | 2.01 |
| 1-methylhistidine | 1.00 | 1.00 | 3.36 | 3.76 | 2.78 |
| N-acetylhistidine | 1.54 | 1.58 | 3.93 | 1.60 | 1.41 |
| trans-urocanate | 1.45 | 0.53 | 3.19 | 0.44 | 0.58 |
| N6-acetyllysine | 1.09 | 1.05 | 1.64 | 1.07 | 1.01 |
| N6,N6-dimethyllysine | 3.31 | 1.00 | 3.89 | 6.34 | 4.88 |
| N-acetyl-cadaverine | 1.00 | 1.00 | 3.77 | 1.00 | 1.00 |
| N-acetylphenylalanine | 1.18 | 1.15 | 2.40 | 1.18 | 1.11 |
| phenyllactate (PLA) | 8.01 | 5.51 | 19.43 | 6.37 | 5.26 |
| 3-(4-hydroxyphenyl)lactate | 5.38 | 4.72 | 19.61 | 5.24 | 4.18 |
| (HPLA) | | | | | |
| isovalerate (C5) | 0.73 | 0.69 | 2.36 | 0.69 | 0.58 |
| N-acetylisoleucine | 1.51 | 1.31 | 9.86 | 1.50 | 1.25 |
| N-acetylvaline | 1.23 | 1.23 | 3.22 | 1.29 | 1.16 |
| N-acetylmethionine | 1.16 | 1.06 | 2.32 | 1.15 | 1.11 |
| S-adenosylmethionine | 4.09 | 4.50 | 7.19 | 4.45 | 2.82 |
| (SAM) | | | | | |
| 2-hydroxy-4- | 2.35 | 1.76 | 4.03 | 1.80 | 1.93 |
| (methylthio)butanoic acid | | | | | |
| homocystine | 2.94 | 1.00 | 1.00 | 1.00 | 2.02 |
| S-methylcysteine | 1.98 | 2.12 | 6.05 | 3.51 | 4.55 |
| N-acetylarginine | 1.54 | 1.50 | 2.65 | 1.53 | 1.42 |
| N-acetylcitrulline | 10.98 | 1.00 | 1.00 | 1.00 | 4.95 |
| acetylagmatine | 1.79 | 1.78 | 3.93 | 1.81 | 1.94 |
| glutathione, oxidized | 1.81 | 1.00 | 3.84 | 1.87 | 3.21 |
| (GSSG) | | | | | |
| 2-hydroxybutyrate/2- | 4.22 | 4.16 | 9.14 | 4.14 | 4.88 |
| hydroxyisobutyrate | | | | | |
| gamma-glutamylhistidine | 1.00 | 1.13 | 2.90 | 1.00 | 2.54 |
| Isobar: hexose diphosphates | 2.60 | 2.54 | 2.51 | 3.71 | 4.57 |
| glucuronate | 1.00 | 1.46 | 5.32 | 1.00 | 1.00 |
| aconitate [cis or trans] | 2.42 | 2.38 | 4.28 | 2.84 | 3.69 |
| alpha-ketoglutarate | 10.33 | 6.88 | 1.40 | 8.74 | 7.16 |
| succinate | 19.41 | 4.90 | 3.80 | 19.53 | 8.74 |
| 2-methylcitrate | 1.88 | 1.73 | 3.75 | 2.89 | 6.47 |
| 5-hydroxyhexanoate | 7.15 | 4.76 | 1.00 | 4.75 | 6.08 |
| 2R,3R-dihydroxybutyrate | 0.85 | 0.80 | 3.97 | 1.10 | 0.75 |
| inositol 1-phosphate (11P) | 1.74 | 1.00 | 1.00 | 1.76 | 1.00 |
| 1-linoleoylglycerol (18:2) | 1.00 | 2.21 | 1.00 | 1.00 | 1.00 |
| 5-aminoimidazole-4- | 1.00 | 1.00 | 5.01 | 1.00 | 1.00 |
| carboxamide | | | | | |
| N6-methyladenosine | 1.69 | 0.93 | 0.52 | 1.52 | 1.74 |
| 2′-O-methyladenosine | 2.66 | 1.47 | 1.02 | 1.66 | 1.87 |
| guanosine 3′- monophosphate | 1.05 | 1.77 | 0.32 | 1.53 | 1.91 |
| (3′-GMP) | | | | | |
| guanosine-2′,3′-cyclic | 1.06 | 2.71 | 0.53 | 2.18 | 2.28 |
| monophosphate | | | | | |
| guanine | 9.41 | 4.41 | 0.13 | 6.07 | 6.55 |
| N-carbamoylaspartate | 10.91 | 11.48 | 27.29 | 11.88 | 8.79 |
| dihydroorotate | 21.71 | 20.59 | 36.40 | 17.46 | 19.45 |
| orotidine | 1.00 | 1.00 | 5.67 | 1.00 | 1.00 |
| 5,6-dihydrouridine | 2.42 | 1.00 | 1.57 | 2.01 | 1.63 |
| cytidine 2′,3′-cyclic | 1.16 | 1.84 | 1.09 | 1.86 | 2.37 |
| monophosphate | | | | | |
| thymine | 2.50 | 2.07 | 12.25 | 2.21 | 1.89 |
| (3′-5′)-adenylylguanosine | 1.00 | 1.00 | 5.89 | 1.00 | 10.37 |
| nicotinamide ribonucleotide | 39.60 | 23.23 | 20.52 | 31.35 | 24.69 |
| (NMN) | | | | | |
| nicotinamide riboside | 186.21 | 139.51 | 284.47 | 173.14 | 154.91 |
| NAD+ | 5.21 | 15.34 | 36.28 | 10.51 | 8.53 |
| pyridoxamine | 1.17 | 1.21 | 1.97 | 1.11 | 1.21 |
| pyridoxamine phosphate | 1.01 | 1.11 | 2.68 | 1.39 | 1.26 |
| 3-dehydroshikimate | 13.75 | 6.66 | 1.16 | 6.53 | 6.82 |
| 4-hydroxybenzyl alcohol | 1.79 | 0.56 | 1.13 | 1.05 | 0.56 |
| quinate | 3.37 | 2.00 | 0.99 | 2.10 | 2.19 |
| homocitrate | 2.10 | 2.20 | 3.32 | 2.34 | 4.00 |

[0284] FIG. 5 depicts the metabolic data obtained by principal component analysis (PCA) the ELA191024 (denoted 24), the ELA191036 (denoted 36) and the ELA191105 (denoted 105) cultured individually or together, including of the cell pellet of the culture and the supernatant of the culture. Additional metabolic analysis of the three strains is provided in FIG. 6, which indicates the number of unique metabolites in the different Bacillus samples in chart form.

### Example 13. Assessment of Bacillus Probiotic Blends for Prevention of Necrotic Enteritis and Improved Growth Performance in Broiler Chickens

[0285] Study Objectives—To evaluate probiotic candidates for their ability to prevent necrotic enteritis and to enhance growth performance with and without a necrotic enteritis challenge.

[0286] Methods

[0287] Treatments and Doses

[0288] The treatment groups and dosing for the different groups of animals in the study are depicted below in Table 16. Note that treatment groups T03 and T04 were given BMD (Bacitracin Methylene Disalicylate), a Type A medicated article (antibiotic mixture) used for the prevention of necrotic enteritis, to maintain increased weight gain and to improve feed efficiency in poultry.

TABLE 16

| | | | | NO. | ANI- | TOTAL |
|---|---|---|---|---|---|---|
| | CHAL- | | | OF | MALS | ANI- |
| GROUP | LENGE | DIET | DOSE (/kg) | PENS | PER PEN | MALS |
| T00 | none | Basal | | 1* | 2,720 | 2,720 |
| T01 | none | Basal | | 10 | 21 | 210 |
| T02 | NE | Basal | | 10 | 21 | 210 |
| T03 | none | BMD | 55 mg | 10 | 21 | 210 |
| T04 | NE | BMD | 55 mg | 10 | 21 | 210 |
| T05 | none | Combo1 | 1.5 × 108 CFU | 10 | 21 | 210 |
| T06 | NE | Combo1 | 1.5 × 108 CFU | 10 | 21 | 210 |
| T07 | none | Combo2 | 1.5 × 108 CFU | 10 | 21 | 210 |
| T08 | NE | Combo2 | 1.5 × 108 CFU | 10 | 21 | 210 |
| T09 | none | Combo3 | 1.5 × 108 CFU | 10 | 21 | 210 |
| T010 | NE | Combo3 | 1.5 × 108 CFU | 10 | 21 | 210 |
| T011 | none | Combo4 | 1.5 × 108 CFU | 10 | 21 | 210 |
| T012 | NE | Combo4 | 1.5 × 108 CFU | 10 | 21 | 210 |
| Total | | | | 121 | | 5,240 |

*At each weighing time, ten (10) groups of twenty-one (21) randomly selected birds will be weighed to obtain growth performance information for T00.

[0289] Strain Combinations

[0290] Strains B. subtilis BSUB19105 (ELA191105), B. subtilis BSUB20082, B. amyloliquefaciens BAMY20071, B. amyloliquefaciens BAMY20082, B. amyloliquefaciens BAMY19006 (ELA191006), B. amyloliquefaciens BAMY19024 (ELA191024), B. amyloliquefaciens BAMY19036 (ELA191036) were utilized and administered in various combinations. The particular combinations of Bacillus strains administered in each of Combo1-Combo4 are noted below in Table 17.

TABLE 17

| COMBINATION | STRAINS |
|---|---|
| Combo1 | BSUB19105 + BAMY20071 + BSUB20082 |
| Combo2 | BSUB19105 + BAMY20071 + BAMY19006 |
| Combo3 | BSUB19105 + BAMY20071 + BAMY19024 |
| Combo4 | BSUB19105 + BAMY19024 + BAMY19036 |

[0291] Experimental Design

[0292] Randomized block design with 12 treatments groups in a 2 (challenges)×6 (diets) factorial arrangement plus an additional control group (TOO).

[0293] Experimental Unit—The experimental unit is the pen.

[0294] Study Phases—A description of the study phases are as follows as provided in Table 18:

TABLE 18

| Study | | | | | Animal | Feed |
|---|---|---|---|---|---|---|
| Phase | Study Days | Diet | Form | Treatments | Weights | Weighback |
| 1 | 0-14 | Starter | Mash | All | Pen | Pen |
| 2 | 14-28 | Grower | Mash | All | Pen | Pen |
| 3 | 28-42 | Finisher | Mash | All | Pen | Pen |

[0295] Randomization Procedures—Assignment of treatments to pens is conducted using a computer program for random number generation or equivalent procedure.

[0296] Animals

[0297] Source—Commercial Hatchery.

[0298] Species—Domestic meat-type broiler chickens, Gallus gallus domesticus.

[0299] Physiological State—Healthy at trial initiation.

[0300] Vaccination

[0301] Birds in treatments T01, T03, T05, T07, T09, T11 are given 1× dose of Coccivac B-52 within one day of arrival. Birds in the NE challenged groups (T02, T04, T06, T08, T10, T12) remain unvaccinated.

[0302] Age—Day of hatch

[0303] Gender—Males

[0304] Breed—Ross 708

[0305] Weight—approximately 35 to 45 g at enrollment.

[0306] Identification—Each pen defines an Experimental Unit and is identified by a unique pen number for each pen within that room or facility. No individual animal identification needed.

[0307] Animal Selection—Animal is clinically assessed to be in good health by the Study Investigator or designated personnel.

[0308] Exclusion Criteria

[0309] Examples include pre-existing and existing conditions or disease (e.g. enteric disease, lameness, neurological disease, septicemia), unthrifty appearance, abnormal conformation, or history of numerous repeated antimicrobial treatments for disease or injury.

[0310] Animal Disposal—Animals are disposed according to site procedures, and observing applicable institutional, local, state, and country guidance and/or regulations. All animals that die or are euthanized during the study are composted at the study facility. All animals completing the study are composted at the study facility and will not enter the food chain.

[0311] Daily Observations—Animals are observed at least once each day during the length of the study. When animals are expected to experience distress from necrotic enteritis (days 17-21), animals should be observed twice daily. All abnormalities and mortalities are recorded. Body weight of mortalities and culls are recorded. If all animals within the pen are observed as normal, no specific documentation for that pen is recorded. No animal is culled solely due to apparent slow growth. Animals that show signs of necrotic enteritis and cannot eat or drink or are considered to be uncomfortable are removed from the study and euthanized.

[0312] A poultry system/clinical sign key is provided below in Table 19.

TABLE 19

Poultry System
GEN = General
EYE = Eyes
GI = Gastrointestinal
RNU = Renal and Urinary
INTG = Integument (Skin and Feathers)
MS = Musculoskeletal and Feet
NAR = Nares
NEU = Neurological
RESP = Respiratory
CDV = Cardiovascular
OTHER = Other
Clinical Sign Key
GEN
CAN = Cannibalism
DEAD = Dead
HEAT = Heat Stress
MISS = Mis-sexed
OMP = Omphalitis
STVN = Starvation
RYS = Retained Yolk Sac
MOR = Morbid or Moribund State
PND = Pain and Distress
EYE
ABS = Abscess
BLI = Blindness
CAT = Corneal Opacity (Cataract)
CONJ = Conjunctivitis
IFL = Inflammation
DCH = Discharge
RED = Redness
GI
ABS = Abscess
ANO = Anorexia
DCH = Discharge
DIA = Diarrhea
PSTV = Pasty Vent
HER = Hernia
PCRP = Pendulus Crop
PRO = Prolapse
RED = Redness
SWE = Swelling
CDV
BLE = Bleeding
EDE = Edema
OTHER = Other can be used for any unlisted systems or
clinical signs
MS
FLEG = Fractured Leg Bone
FWNG = Fractured Wing Bone
FWT = Fractured Wing Tip
CLT = Curled Toes
DIS = Dislocation
IFL = Inflammation
LAC = Laceration
LAM = Lameness
NOA = Non-Ambulatory
PAS = Paresis
SPLY = Splay Legs/Spraddle Legs
SPLT = Slipped Tendon
NAR
DCH = Discharge
SS = Swollen Sinus
NEU
DEP = Depression
TOR = Torticollis (twisted neck)
TRE = Tremors
SPA = Spasms
CONV = Convulsions
HES = Hyperesthesia
PAR = Paralysis
RESP
SNI = Snicking/ Sneezing
LB = Labored Breathing
PAN = Panting
INTG
ABS = Abscess
FEA = Feather Loss
DER = Dermatitis
DPIG = Depigmentation
HPIG = Hyperpigmentation
LAC = Laceration
LES = Lesion
SWE = Swelling

[0313] A poultry necroscopy key is provided in Table 20.

TABLE 20

Poultry Necropsy Key
System
GEN = General
CDV = Cardiovascular
EYE = Eyes
GI = Gastrointestinal
RNU = Renal and Urinary
INTG = Integument (Skin and Feathers)
MS = Musculoskeletal and Feet
RESP = Respiratory
SYS = Systemic
OTHER = Other
Diagnosis¹
GEN
ASPH = Asphyxiation
CAN = Cannibalism
DEHY = Dehydration
HEAT = Heat Stress
NOGL = No Gross Lesions
OMP = Omphalitis
RYS = Retained Yolk Sac
STVN = Starvation
CDV
ARUP = Aortic Rupture
ATHR = Atherosclerosis
DCMP = Dilated (Spontaneous) Cardiomyopathy
ENDO = Endocarditis
PERI = Pericarditis
SDPH = Perirenal Hemorrhage Sudden Death
EYE
BLPH = Blepharoconjunctivitis
BUPH = Buphthalmos
CHOR = Chorioretinitis
KCNJ = Keratoconjunctivitis
GI
ASC = Ascites
CHLM = Chlamydiosis
HELM = Helminthiasis
HENT = Hemorrhagic Enteritis
HLIP = Hepatic Lipidosis
IMPN = Impaction
NENT = Necrotic Enteritis
PCRP = Pendulous Crop
PRO = Prolapse
PSTV = Pasty Vent
PROT = Protozoal Infection
THRU = Thrush
TENT = Transmissable Enteritis
RNU
NEPH = Nephritis
PRO = Prolapse
ULTH = Urolithiasis
VSGT = Visceral Gout
INTG
ABS = Abscess
BRBL = Breast Blister
DER = Dermatitis
ECTO = Ectoparasite Infestation
LAC = Laceration
MS
ARGT = Articular Gout
DISJ = Dislocated Joint
DPMY = Deep Pectoral Myopathy
DSCH = Dyschondroplasia
FLEG = Fractured Leg Bone
FWNG = Fractured Wing Bone
OCDS = Osteochondritis
OSTM = Osteomyelitis
SEPT = Septic Arthritis
SLPT = Slipped Tendon
SPDL = Spondylolisthesis
SPLY = Splay Legs/Spraddle Legs
TNSN = Tendonitis/Tenosynovitis
VLVR = Valgus/Varus Deformation
RESP
AIRS = Airsacculitis
ASPG = Aspergillosis
BRCH = Bronchitis
CHLM = Chlamydiosis
INFL = Influenza
PNM = Pneumonia
RHNO = Rhinotracheitis
SNTS = Sinusitis
SYS
CHLM = Chlamydiosis
COLI = Colibacillosis
ERYS = Erysipelas
FCHL = Fowl Cholera
PTNT = Peritonitis
SPTM = Septicemia
OTHER
OTHER = used for any unlisted system or diagnosis
¹Findings not confirmed by culture and/or isolation, but gross lesions consistent with a particular disease or condition.

[0314] The schedule of events for the study, including study activity for each of the various study days is provided below in Table 21.

TABLE 21

| Study Day | Study Activity |
|---|---|
| All Study | Conduct and record daily observations on all animals |
| Days 0-42 | Feed issue as needed |
| 0 | Randomization of animals to pens |
| | Bird Pen Weight |
| | Feed Issue - Starter diets |
| 1 | T01, T03, T05, T07, T09, T11 - Give 1x dose of Coccivac B-52 |
| 2-12 | |
| 13 | T02, T04, T06, T08, T10, T12 - Gavage with E. maxima (10,000 oocysts/birds) |
| 14 | Feed Weighbacks (Starter diets) |
| | Bird Pen Weight |
| | Feed Issue - Grower diets |
| 15-16 | |
| 17 | T02, T04, T06, T08, T10, T12 - Gavage with C. perfringens JP1011 |
| | (106 CFU/bird) |
| 18 | |
| 19 | T01, T02, T04, TO6, T08, T10, T12 - Necropsy 3 birds per pen for lesion scoring. |
| | T03, T05, TO7, T09, T11 - Remove and weigh 3 birds per pen. |
| | 11 Nov. 2020 |
| 20-27 | |
| 28 | Feed Weighbacks |
| | Bird Pen Weights |
| | Feed Issue - Finisher Treatment Diets |
| 29-42 | |
| 42 | Bird Pen Weights |
| | Feed Weighbacks (Finisher diets) |
| | End of Study |

[0315] Necrotic Enteritis Challenge

[0316] On day 13 treatment groups T02, T04, T06, T08, T10, T12 are inoculated via oral gavage with 10,000 oocysts/mL/bird of Eimeria maxima.

[0317] On day 17 treatment groups T02, T04, T06, T08, T10, T12 are inoculated via oral gavage with 1×106 CFU/mL/bird of C. perfringens (NAH 1314-JP1011).

[0318] The study site should provide adequate staffing to prevent employee fatigue that could negatively impact the welfare of the birds when gavaging a large number of animals.

[0319] Measurements

[0320] Performance
[0321] Pen body weights at days 0, 14, 28, 42.
[0322] Feed addition to each pen.
[0323] Pen unconsumed feed at the end of each feeding phase

[0324] Lesion Scoring

[0325] On day 19, three birds from each pen in treatment groups T01, T02, T04, T06, T08, T10, T12 are randomly selected (by first bird caught), sacrificed, weighed, and examined for the degree of presence of necrotic enteritis lesions. The scoring is based on a 0 to 4 score as follows as provided in Table 22:

TABLE 22
Lesion scoring for necrotic enteritis (NE)-typical
lesions (according to Prescott and others 1978)

| Lesions score (NE) | Observed macroscopic finding |
|---|---|
| 0 | No gross lesions |
| 1 | Thin-walled or friable small intestine |
| 2 | Focal necrosis or ulceration |
| 3 | Larger patches of necrosis |
| 4 | Severe, extensive necrosis typical of field cases |

[0326] Source: A. A. Alnassan et al, Necrotic enteritis in chickens: development of a straightforward disease model system; 2014. Veterinary Record.

[0327] In order to maintain similar stocking density, three birds from the remaining treatment groups (T03, T05, T07, T09, T11) are removed and weighed. Gut tissues or contents may be collected from some or all treatments for non-study related activities. Study sponsor will provide sampling materials for tissue collection.

[0328] Mortality—Reason for mortality is documented. Mortality is separated as NE induced and others. Dead bird weight is documented

[0329] Animal Management and Housing

[0330] Facility Layout—A facility diagram is provided in FIG. 7.

[0331] Litter—Used litter is used for this study

[0332] Management and Environmental Conditions
[0333] Comply with 2010 Guide for the Care and Use of Agricultural Animals (3′ d edition, FASS, 2010) or similar guideline.
[0334] Comply with any applicable institutional, local, state, and country regulations.
[0335] According to the procedures of the facility.

[0336] Animal Feeds—Nutritional requirements were estimated by regressing nutrient recommendations of Aviagen (Huntsville, AL) for Ross 708 over time in order to match the feeding phases in this protocol.

[0337] Diet Formulation

[0338] For each feeding phase, diets were least-cost formulated using the Diet Formulation and Evaluation Software (version metric 4-16-13, JMJ 01232012). The feed is commercial type rations and formulated to meet Ross 708 Commercial Nutrient Guidelines (Ross 708, 2014) nutrient recommendations for broilers. Basal diets are transferred to Blue River Research facility for test article inclusion.

[0339] The diet formulation/feed ingredients for each of the Starter, Grower and Finisher phases is provided below in Table 23.

TABLE 23

| | Starter | Grower | Finisher |
|---|---|---|---|
| | (d 0-14) | (d 14-28) | (d 28-42) |
| Ingredients (%) | | | |
| Corn, yellow dent | 53.485 | 53.885 | 56.155 |
| Soybean meal, 47.0% CP | 36.48 | 33.00 | 28.46 |
| Soybean oil | 2.27 | 3.94 | 4.54 |
| Corn DDGS | 4.00 | 6.00 | 8.00 |
| L-lysine HCl | 0.20 | 0.12 | 0.12 |
| DL-methionine | 0.29 | 0.23 | 0.20 |
| L-threonine | 0.16 | 0.10 | 0.07 |
| Dicalcium phosphate 18.5% | 1.19 | 0.90 | 0.66 |
| Limestone | 1.27 | 1.18 | 1.15 |
| Salt | 0.33 | 0.32 | 0.32 |
| Promote phytase 2500 | 0.025 | 0.025 | 0.025 |
| Provimi 5 PMX | 0.30 | 0.30 | 0.30 |
| Calculated Analyses (%) | | | |
| ME (kcal/kg) | 3018 | 3134 | 3204 |
| CP | 22.1 | 20.9 | 19.4 |
| Dig Lys | 1.26 | 1.12 | 1.01 |
| Dig Met | 0.63 | 0.57 | 0.52 |
| Dig Thr | 0.86 | 0.76 | 0.68 |
| Ca | 0.95 | 0.85 | 0.78 |
| Av P | 0.48 | 0.43 | 0.39 |

[0340] Feed Manufacturing

[0341] All treatments using test article are administered in the feed. Study sponsor prepares test by spraying a spore concentrate onto a ground rice hull carrier followed by drying. This results in a free-flowing dry product that can be easily blended into the feed. The pre-blend consists of the phase basal diet and test article. The amount of test article for each mixture is calculated based on the treatment batch size. The pre-blend mixture is allowed to continue mixing for at least 5 minutes. As the pre-blend is mixing, it is ensured that no test article adheres to the sides or mixing arm of the floor mixer. After pre-blend mixture is manufactured, it is blended with the batch of basal diet to form the desired treatment diet. Final treatment diets are mixed for approximately 10 min. Diets are fed to birds in mash form.

[0342] Feed Labelling—The feed is stored in 22.67-kg capacity new feed sacks labeled with study number (ELAVV200198), feed ID (starter, grower, finisher), treatment ID, and treatment color code. Feed for treatment groups with the same diet (e.g. T03 & T04) can be made in the same batch.

[0343] Feed Samples

[0344] One sample of about 500 g from each diet and phase is collected, labeled, and stored frozen at BRRS. One additional sample from the T01 diets is sent to Minnesota Valley Testing Laboratory (MVTL) for proximate analysis of crude protein, fat, moisture, ash, Na, Ca, and P.

[0345] Statistical Analysis

[0346] Key Variables

[0347] Growth performance (average daily gain, average daily feed intake, gain efficiency, etc.) is calculated and evaluated for each study phase and overall. Removals and mortality are documented by treatment. General health records (e.g. diarrhea, respiratory problems, etc.) are documented by treatment and cause of illness.

[0348] The list of variables and calculations for each pen are provided below in Table 24.

TABLE 24

| List of Variables | Calculation for each pen |
|---|---|
| Average body weight in | Pen weight of the Feeding Phase: animal inventory at the end of |
| kilograms (Feeding Phase) | the Feeding Phase |
| Average Daily Gain, ADG | (Average body weight at the end of the Feeding Phase -average |
| in grams (Feeding Phase) | body weight at the start of the Feeding Phase) = number of days |
| | in the Feeding Phase) × 1,000 |
| Average Daily Feed Intake, | Total Feed Intake in the Feeding Phase: Final animal inventory |
| ADFI in grams (Feeding Phase) | # number of days in the Feeding Phase × 1,000 |
| Unadjusted Feed conversion | ADFI of the Feeding Phase: ADG of the Feeding Phase |
| ratio, FCR (Feeding Phase) | |
| Unadjusted Gain Efficiency, | ADG of the Feeding Phase # ADFI of the Feeding Phase |
| GF (Feeding Phase) | |
| European Broiler Index, | [(Average body weight at the end of the Feeding Phase = age of |
| EBI (Feeding Phase) | animals in days at the end of the Feeding Phase) x percent |
| | survival of the Feeding Phase] = (FCR of the feeding phase x 10) |
| Mortality Adjusted Average | [(Pen weight at the end of the Feeding Phase - pen weight at the |
| Daily Gain, in grams | start of the Feeding Phase + 2(Pen mortality weight)] = [(animal |
| MA_ADG (Feeding Phase) | inventory at the end of the Feeding Phase + 2(Animal days of |
| | mortality of the Feeding Phase)] × 1,000 |
| Mortality Adjusted Average | Total Feed Intake in the Feeding Phase: [(Final animal inventory × |
| Daily Feed Intake, MA_ADFI | number of days in the Feeding Phase) + 2(Animal days of |
| in grams (Feeding Phase) | mortality of the Feeding Phase)] × 1,000 |
| Mortality Adjusted Feed conversion | MA_ADFI of the Feeding Phase: MA_ADG of the Feeding |
| ratio, MA_FCR (Feeding Phase) | Phase |
| Mortality Adjusted Gain Efficiency, | MA_ADG of the Feeding Phase: MA_ADFI of the Feeding |
| MA_GF (Feeding Phase) | Phase |

[0349] Data Analysis—All variables are analyzed using a two-way analysis of variance using JMP version 14.0 or higher (SAS Institute, Inc., Cary NC) with challenge status and diet as fixed effects and block as a random effect. All pair-wise comparisons are evaluated using a two-tail t-test. Pen serves as the experimental unit for growth performance measurements.

[0350] Results

[0351] In accordance with the treatments and doses and the study protocol outlined above, various (eight) Bacillus combinations were tested in Ross 708 breed of broiler chickens Gallus gallus domesticus with and without necrotic enteritis challenge over the 42 day study period. The animals were given a corn and soybean mash diet as described above.

[0352] Three phases were conducted: Phase 1 (Days 0-14), Phase 2 (Days 14-28) and Phase 3 (Days 28-42). For the necrotic enteritis (NE) challenge animals were administered by gavage (through a tube leading down the throat to the stomach) 10,000 oocytes of Eimeria maxima (E. maxima) on Day 13 and 10⁶ CFU Clostridium perfringes (C. perfringes) bacteria strain JP1011 on day 17. The animals were housed in pens in a facility as depicted in FIG. 7.

[0353] The final body weight, feed conversion and survival of unchallenged animals is depicted in FIG. 8, where it is noted that one outlier pen (circled) was removed from the T01 unchallenged control due to inordinate outlier results across all three measures.

[0354] The weight gain in unchallenged chickens is depicted in FIG. 9, particularly average daily gain (FIG. 9A) and mortality-adjusted average daily gain (ADG) (FIG. 9B). The results are charted on a color coded scale in FIG. 9C. Unchallenged animals with BMD (antibiotic) and Combo 3 (BSUB19105+BAMY20071+BAMY19024) demonstrated an average daily gain (ADG) and mortality adjusted ADG that was improved/better vs the basal diet situation. Unchallenged animals with BMD and Combo 3 demonstrated similar to near equivalent results. Combo 1 (BSUB19105+BAMY20071+BSUB20082) also demonstrated some improvement versus basal.

[0355] The feed intake in unchallenged chickens is depicted in FIG. 10, particularly average daily feed intake (FIG. 10A) and mortality-adjusted average daily average daily feed intake (ADFI) (FIG. 10B). The results are charted on a color coded scale in FIG. 10C. Unchallenged animals with BMD (antibiotic) and Combo 3 (BSUB19105+BAMY20071+BAMY19024) demonstrated a mortality adjusted ADFI that was improved/better vs the basal diet. Unchallenged animals with BMD and Combo 3 demonstrated similar to near equivalent mortality adjusted ADFI results.

[0356] The feed efficiency in unchallenged chickens is provided in FIG. 11. FIG. 11A depicts feed conversion ratio and 11B depicts mortality-adjusted feed conversion ratio (FCR). The results are charted on a color coded scale in FIG. 11C. Combo 1 (BSUB19105+BAMY20071+BSUB20082) and Combo 3 (BSUB19105+BAMY20071+BAMY19024) demonstrated a feed conversion ratio and mortality-adjusted feed conversion ratio (FCR) that was improved vs the basal diet in both instances and was improved versus unchallenged animals with BMD (antibiotic) or the same as unchallenged animals with BMD, respectively.

[0357] Production efficiency and mortality in unchallenged chickens is provided in FIG. 12, with the European Broiler Index provided in 12A and mortality results indicated in 12B. The results are charted on a color coded scale in FIG. 12C. Combo 3 (BSUB19105+BAMY20071+BAMY19024) demonstrated a significant EBI index improvement versus all other Diets and Combos. Unchallenged animals with BMD (antibiotic), Combo 1 (BSUB19105+BAMY20071+BSUB20082) and Combo 2 (BSUB19105+BAMY20071+BAMY19006) all showed EBI index improvement over basal. In terms of mortalities, the BMD animals had a significantly higher (worse) mortality percentage versus all other diet situations. Both Combo 2 and Combo 3 Bacillus strain combinations had improved mortalities.

[0358] Necrotic enteritis (NE) lesion scores were assessed on Day 19 of the study, two days post challenge with C. perfringes on Day 17. The results are provided in FIG. 13. Lesions in the animals were scored 0, 1, 2, 3 and 4 in accordance with the observed macroscopic finding as provided in Table 21, with 3 indicating larger patches of necrosis and 4 indicating severe, extensive necrosis typical of field cases. The percentage of each of the scores 0-4 for each of the diets/combos and the average scores are shown in FIGS. 13A and B. The percentage (%) of animals with scores 3 or greater (3+) for each of the diet/combos tested are shown in 13C. The results are charted in FIG. 13D with better % vs basal indicated by a color coding (blue being better). BMD, Combo 2, Combo 3 and Combo 4 all showed improvement in average lesion scores, with Combo 3 being the most significant. Similar results were seen in the lesion scores 3+which were reduced in each of BMD, Combo 2, Combo 3 and Combo 4, with Combo 3 being the most significant.

[0359] Weight gain with NE challenge, particularly average daily gain and mortality-adjusted average daily gain (ADG), was then assessed, with results provided in FIG. 14A and B. Results are charted in FIG. 14C and indicate that BMD and Combo 3 provided the most significant improvement in ADG. Combo 1 also improved ADG. Combo 2 and Combo 4 showed improvement in ADG over basal as well. Mortality-adjusted ADG was very significantly improved in either BMD diet or with Bacillus Combo 3. Combo 1 also demonstrated good improvement. Combo 2 and Combo 4 also gave improvement over basal.

[0360] Feed intake with NE challenge, particularly average daily feed intake and mortality-adjusted average daily feed intake (ADFI) was evaluated and data is provided in FIG. 15A and B. FIG. 15C provides a chart of the results, with better % vs basal indicated by a color coding (blue being better). The results show that Combo 3 showed most significant difference versus basal diet, providing improvement in average daily feed intake (ADFI) and Mortality adjusted ADFI. Combo I provided the next most significant improvement over basal in ADFI. Combo 2 also showed improvement in ADFI. BMD and Combo 1 showed improvement in average daily feed intake versus basal. In terms of mortality adjusted ADFI, BMD demonstrated the next most significant improvement after Combo 3. Some improvement with Combo 1 was also seen, as well some but less improvement with Combo 2 and Combo 4.

[0361] Feed efficiency with NE challenge was evaluated, with results provided in FIG. 16A and B and % improvement versus basal diet charted in FIG. 16C. Only BMD diet provided much improvement in feed conversion ratio (FCR). The improvement vs basal was minimally worsened with Combos 1-4. Mortality adjusted FCR was improved with BMD and also with Combo 3 in particular and about equally. Combo 1 showed some improvement also. Minimal but some improvement was demonstrated with Combo 2 and Combo 4.

[0362] Production efficiency and mortality with NE challenge, particularly European Broiler Index (EBI) and necrotic enteritis (NE) mortality were evaluated and results are depicted in FIG. 17 A and B. The % change versus Basal diet is charted in FIG. 17C. European Broiler Index (EBI) with NE challenge was improved with BMD, however each of Combos 1-4 showed worse EBI numbers. NE mortality was also improved with BMD. Each of Combos 1-4 showed worse mortality figures.

[0363] Pen weight uniformity with NE challenge and unchallenged is charted in FIG. 18.

[0364] A comparison of overall results for each measure with Combo 3 (strains BSUB19105+BAMY20071+BAMY19024) versus BMD and the % difference versus control (Ctrl) Basal diet is provided in FIG. 19. Combo 3 demonstrated improved growth performance in unchallenged and and necrotic enteritis (NE) challenged conditions. The Combo 3 combination of a B. subtilis strain, particularly BSUB19105) and two B. amyloliquefaciens strains (BAMY20071 and BAMY19024) significantly reduced NE lesion scores in the animals. These strains are diverse Bacillus strains with one being a B. subtilis bacteria strain and the other two being distinct B. amyloliquefaciens strains.

[0365] Additional results with Bacillus strains tested here, including B. subtilis strain BSUB19105, the B. amyloliquefaciens strain BAMY20071 and the B. amyloliquefaciens strain BAMY19006, in post-weaning piglets is provided in Example 14. Good pilot efficacy in broiler chickens with B. amyloliquefaciens strain BAMY19024 alone has also been observed and determined (data not shown). Metabolomics data with strains B. subtilis strain BSUB19105 and B. amyloliquefaciens strain BAMY19024 is provided above herein, including in Example 12.

[0366] While the Bacillus strain combinations tested in the study described in this Example did not improve NE survival or mortality in this study, various combinations, including Combo 3, as well as in certain aspects other tested Bacillus strain combinations, showed improvement in various assessed parameters. Reduction in NE lesion scores, improved weight gain, improved feed intake for example have been shown with strain combinations. These improvements can significantly effect and impact for reduced necrotic enteritis, including reduced lesions and improvements with regard to animal housing, animal management and costs, even if survival is not improved overall and mortality is not reduced.

### Example 14. Assessment of Bacillus Probiotic Combinations for Reducing the Impact of Post-Weaning Diarrhea in Piglets

[0367] This study was undertaken to provide an assessment of Bacillus probiotic combinations for reducing the impact of post-weaning diarrhea in piglets.

[0368] Post-weaning diarrhea is a common and problematic issue and outbreaks can result in high morbidity and mortality and detrimentally affect production and costs. Diarrhea can result from various bacteria or viruses infecting or colonizing a pen, herd or group of animals.

[0369] Study Objectives—Assess probiotic combinations for their ability to reduce the impact of post weaning diarrhea as measured by fecal scores, Escherichia coli quantification, and growth performance.

[0370] Methods

[0371] Treatment and Doses—The treatment groups and dosing for the different groups of animals in the study are depicted below in Table 25. The Control treatment is without antibiotic or pharmacological levels of Zn and Cu. The Conventional treatment contains 110 ppm of Tylan (antibiotic also denoted as tylosin, used for colitis and chronic diarrhea), 2,500 ppm of Zn from ZnO and 125 ppm of Cu from CuSO4 or tribasic copper chloride.

TABLE 25

| | | Dose | Treatment | | No. | |
|---|---|---|---|---|---|---|
| | | (CFU/g | Duration, | Pigs/ | of | Total |
| Code | Treatment | of feed) | days | pen | Pens | Animals |
| T01 | Control* | 0 | 42 | 5 | 7 | 35 |
| T02 | Conventional** | 0 | 42 | 5 | 7 | 35 |
| T03 | B. subtilis 1E | 10⁵ | 42 | 5 | 7 | 35 |
| T04 | B. subtilis 1G | 10⁵ | 42 | 5 | 7 | 35 |
| T05 | B. subtilis 1E + | 10⁵ | 42 | 5 | 7 | 35 |
| | B. subtilis 1G | | | | | |
| T06 | B. subtilis 1E + | 10⁵ | 42 | 5 | 7 | 35 |
| | B. subtilis 1D | | | | | |
| T07 | B. subtilis 1E + | 10⁵ | 42 | 5 | 7 | 35 |
| | B. subtilis 1D + | | | | | |
| | B. subtilis 1G | | | | | |
| T08 | BSUB20025 + | 10⁵ | 42 | 5 | 7 | 35 |
| | BSUB19105 + | | | | | |
| | BAMY19006 | | | | | |
| T09 | BSUB19105 + | 10⁵ | 42 | 5 | 7 | 35 |
| | BAMY19006 + | | | | | |
| | BAMY20071 | | | | | |
| T10 | BSUB20025 + | 10⁵ | 42 | 5 | 7 | 35 |
| | BAMY20071 | | | | | |
| T11 | BSUB20025 + | 10⁵ | 42 | 5 | 7 | 35 |
| | BSUB19105 | | | | | |
| T12 | BSUB19105 + | 10⁵ | 42 | 5 | 7 | 35 |
| | BAMY19006 | | | | | |
| Total | | | | | 84 | 420 |

*Without antibiotic or pharmacological levels of Zn and Cu
**Containing 110 ppm of Tylan, 2,500 ppm of Zn from ZnO and and 125 ppm of Cu from CuSO4 or tribasic copper chloride.

[0372] Experimental Design—The experimental design will be a randomized block design with 12 treatments in 7 blocks of 12 pens each.

[0373] Experimental Unit—The experimental unit will be both the pen and the pig.

[0374] Study Phases—A description of the study phases are as follows shown below in Table 26:

TABLE 26

| Dietary Study | Expected Body | Study | | Feed |
|---|---|---|---|---|
| Phases | Weight Range, kg | Days | Treatments | Form |
| 1 | 7.0 to 9.6 | 0 to 7 | 1 to 12 | Meal |
| 2 | 9.6 to 14.6 | 7 to 21 | 1 to 12 | Meal |
| 3 | 14.6 to 28.0 | 21 to 42 | 1 to 12 | Meal |
| Overall | 7.0 to 28.0 | 0 to 42 | 1 to 12 | Meal |

[0375] A schedule of events for each study day(s) and study activity if provided below in Table 27.

TABLE 27

| Study Day | Study Activity |
|---|---|
| 0 thru 42 | Conduct and record daily observations on all animals |
| | Fecal scoring |
| | Feed Issue as needed |
| 0 | Randomization of animals to pens |
| | Individual Animal Weights |
| | Feed Issue - Phase 1 Diets |
| 1 thru 6 | |
| 7 | Individual Animal Weights |
| | Feed Weighbacks |
| | Feed Issue - Phase 2 Diets |
| 8 thru 13 | |
| 14 | Collect fecal samples from 2 pigs per pen |
| 15 thru 20 | |
| 21 | Individual Animal Weights |
| | Feed Weighbacks |
| | Feed Issue - Phase 3 Diets |
| 22 thru 41 | |
| 42 | Individual Animal Weights |
| | Feed Weighbacks |
| | End of study |

[0376] Randomization Procedures—Assignment of treatments to pens will be conducted using a computer program for random number generation. The computer-generated assignment will be included in the study data file and final study report.

[0377] Animals

[0378] Source—Pigs from a single herd and lot of weaned pigs.

[0379] Species—Domestic pig, Sus scrofa.

[0380] Physiological State—Healthy at trial initiation with the customary vaccination program at the source farm, which may include: Mycoplasma hyopneumoniae, Porcine Circovirus Type 2 (PCV2), and Porcine Reproductive and Respiratory Syndrome (PRRS) virus, etc. Information regarding animal source and vaccination history will be recorded and documented in the study data file.

[0381] Age—Animals will be on average 21±3 days of age and immediately after weaning.

[0382] Gender—Balance genders among treatments. Final distribution will depend on pig availability.

[0383] Breed—PIC Camborough sows x PIC 359 boar or equivalent.

[0384] Weight—Approximately 7.0 kg at enrollment.

[0385] Identification—Individual numbered ear tag.

[0386] Animal Selection—Each animal must meet the following inclusion criteria: At day 0, pigs will be clinically assessed to be in good health by the Study Investigator or designated personnel.

[0387] Animal source and vaccination history will be documented in the study records.

[0388] Each animal will be identified by a unique ID ear tag.

[0389] Exclusion Criteria—Animals not meeting the inclusion criteria outlined above in animal selection. Examples include pre-existing and existing conditions or disease (e.g. lameness, neurological disease, septicemia), unthrifty appearance, abnormal conformation, or history of numerous repeated antimicrobial treatments for disease or injury.

[0390] Animal Disposal—Animals will be disposed of according to site procedures, and observing institutional, local, state, and national guidelines and/or regulations. All animals that die or are euthanized during the study will be composted at the study facility. All animals completing the study may be marketed and enter the food chain.

[0391] Observations, Examinations, and Tests

[0392] Daily Observations

[0393] Pigs will be observed at least once each day during the length of the study. All abnormalities and mortalities will be recorded. Body weight of mortalities and culls will be recorded. If all animals within the pen are observed as normal, no specific documentation for that pen will be recorded. No animal will be culled solely due to apparent slow growth.

[0394] A swine system/clinical sign key is provided in Table 28 below:

TABLE 28

System
CDV = Cardiovascular
EAR = Ear and Labyrinth
EYE = Eyes
GEN = General
GI = Gastrointestinal
INTG = Skin and Integument
MS = Musculoskeletal
NEU = Neurological
REP = Reproductive
RESP = Respiratory Tract
RNU = Renal and Urinary
OTHER = Other
Clinical Sign
CDV
BRAD = Bradycardia
EDE = Edema
HEMR = Hemorrhage
TACH = Tachycardia
EAR
ABS = Abscess/Cystic
DCH = Discharge
IFL = Inflammation
LES = Lesion
SWE = Swelling (e.g., bubble ear)
EYE
ABS = Abscess/Cystic
BLI = Blindness
DCH = Discharge
IFL = Inflammation
LES = Lesion
RED = Redness
GEN
DEAD = Dead
LET = Lethargic
MORB = Moribund
GI
ANO = Anorexia
DIA = Diarrhea
HER = Hernia
HEMR = Hemorrhage
IPAR = Internal Parasite Infestation
PRO = Prolapse
INTG
ABS = Abscess/Cystic
ALO = Alopecia
DER = Dermatitis
ECTO = Ectoparasite Infestation
LAC = Laceration
LES = Lesion
SWE = Swelling
MS
CONT = Contusion
FBON = Fractured
LMNS = Laminitis
IFL = Inflammation
LAC = Laceration
LAM = Lameness
NOA = Non-Ambulatory
NEU
ATX = Ataxia
CIR = Circling
NYS = Nystagmus
PAR = Paralysis
PAS = Paresis
TLT = Head Tilt
REP
ABS = Abscess/Cystic
DCH = Discharge
EST = Estrus
HER = Hernia
IC = Incomplete
PRO = Prolapse
RED = Redness
SWE = Swelling
RESP
COU = Coughing
DCH = Discharge
LB = Labored Breathing
PNM = Pneumonia
RNU
DCH = Discharge
SWE = Swelling
RED = Redness
OTHER
Other = used for any unlisted systems or clinical signs

[0395] Measurements—the following measurements are taken and noted:
[0396] Individual body weights
[0397] Feed addition to each pen
[0398] Unconsumed feed at the end of each feeding phase
[0399] Fecal score per pen

[0400] Fecal Score—For fecal score, pigs ware observed daily for clinical signs of diarrhea which will be scored using a 5-point fecal scoring system that will be used to indicate the presence and severity of diarrhea:
[0401] 1 None (normal feces)
[0402] 2 Minimal (slightly soft feces)
[0403] 3 Mild (soft, partially formed feces)
[0404] 4 Moderate (loose, semi-liquid feces)
[0405] 5 Severe (watery, mucous-like feces)

[0406] Scores for individual pens are recorded daily in the morning by a trained technician. Pigs with severe diarrhea may be individually treated according to prescription of the attending veterinarian.

[0407] Fecal Collection

[0408] Collection tubes should be labeled with the pen number and animal ID. Fecal samples are collected aseptically. A clean disposable glove is used for each pig. Do not use any lubricants if manual stimulation is needed. Approximately 1 to 3 grams of feces is collected into a clean 50 mL tube containing 15 mL of LB broth with 10% glycerol and stored at −20° C., preferably −80° C., until ready to be shipped on dry ice to Elanco Animal Health.

[0409] Sample Collection—The Schedule of Events Table 26 above indicates the schedule and applicable study day(s) for fecal collection.

[0410] Animal Management and Housing

[0411] Facility Layout—A facility diagram is included in FIG. 20.

[0412] Management and Environmental Conditions
[0413] Comply with 2010 Guide for the Care and Use of Agricultural Animals (3rd edition, FASS, 2010) or similar guideline.
[0414] Comply with any applicable institutional, local, state, and national regulations.
[0415] According to the procedures of the facility.

[0416] Conditions and parameters for various aspects are provided below in Table 29.

TABLE 29

| | |
|---|---|
| Space Allocation: | Approximately 4.8 ft²/animal of usable floor space in a pen in an |
| | indoor facility. Flooring will be concrete slats. |
| Lighting: | Animals will receive approximately 18 hrs of light for every |
| | 24 hour interval. |
| Heating Program: | Temperature and fan settings will be adjusted to meet |
| | recommended thermal conditions for each stage of growth per |
| | facility procedure. Supplemental heat may |
| | be used via individual pen heaters as needed. |
| Ventilation Program: | Mechanical |
| Feeding Program: | Animals will be meal fed via a three-section stainless steel |
| | nursery type feeder. |
| Watering Program: | Ad libitum access to water via cup waterers. |
| Euthanasia | Animals will be euthanized by designated personnel according to |
| Procedure: | site specific procedures (M-012), and in accordance with |
| | accepted AVMA or other referenced |
| | guidelines and procedures. |

[0417] Animal Feeds

[0418] Nutrient Requirements

[0419] Nutritional requirements were estimated using the computer model (v.06-19-12a) of the Nutrient Requirements of Swine: Eleventh Revised Edition downloaded on Oct. 20, 2016 from The National Academies Press website (nap.edu/download/13298). Requirements for all feeding phases were estimated with a diet metabolic energy (ME) content of 3,300 kcal/kg. Requirements for Phase 1 and Phase 2 were calculated using the “Starting Pigs” module of the aforementioned software using mean BW of 8.3 and 12.1 kg, respectively. Requirements for Phase 3 were estimated using both the “Starting Pigs” and “Growing-Finishing Pigs” modules of the software as follows:
[0420] A mean BW of 17.3 kg was used in the “Starting Pigs”,
[0421] Input parameters for the “Growing-Finishing Pigs” module were 20 and 28 kg BW for initial and final BW, respectively, under “Whole body protein deposition (Pd) pattern” the option “Specify PdMax and StartPdMax decline” was selected with values of 135.0 for “PdMax, g/day” and 90.0 for “Body weight at start of PdMax decline, kg”; and
[0422] A weighted average was calculated for the 3-week period of feeding Phase 3 diet as: “Starting Pigs” as ⅓ and “Growing-Finishing Pigs” as ⅔.

[0423] Diet Formulation

[0424] For each feeding phase, European-type diets were least-cost formulated using the Diet Formulation and Evaluation Software (version metric 4-16-13, JMJ 01232012) of the 2010 National Swine Nutrition Guide (www.uspork.org) using the nutrient recommendations obtained (see Table 30 and Table 31 below for ingredients and calculated/calculation of nutrients and also Table 31 for certain calculations.

TABLE 30

| Ingredient | Phase 1 | Phase 2 | Phase 3 |
|---|---|---|---|
| Corn, ground, 8% CP | 47.67 | 59.03 | 68.43 |
| Soybean meal, 47% CP | 15.45 | 24.00 | 28.00 |
| Whey, dried, 12% CP | 27.78 | 11.11 | — |
| Fishmeal, menhaden, 62% CP | 3.00 | 2.00 | — |
| Spray-dried plasma, 78% CP | 3.50 | 1.00 | — |
| L-lysine HCI | 0.44 | 0.48 | 0.55 |
| DL-methionine | 0.22 | 0.20 | 0.21 |
| L-threonine | 0.15 | 0.18 | 0.21 |
| L-isoleucine | 0.09 | 0.04 | 0.03 |
| L-tryptophan | 0.04 | 0.03 | 0.04 |
| L-valine | 0.01 | — | — |
| Monocalcium phosphate, 21% P | 0.38 | 0.40 | 0.66 |
| Calcium carbonate | 0.85 | 0.86 | 1.00 |
| Salt | 0.25 | 0.35 | 0.50 |
| Sodium bicarbonate | 0.07 | 0.20 | 0.25 |
| Promote phytase | — | 0.02 | 0.02 |
| Belstra vitamin-mineral premix* | 0.10 | 0.10 | 0.10 |

Vitamin and trace mineral premix must be free of phytase, any other enzyme, or feed additive.

TABLE 31

| Calc. Nutrient | Phase 1 | Phase 2 | Phase 3 |
|---|---|---|---|
| ME, kcal/kg | 3,327 | 3,340 | 3,340 |
| NE, kcal/kg | 2,590 | 2,570 | 2,473 |
| CP, % | 19.1 | 19.3 | 18.5 |
| ADF, % | 2.7 | 3.6 | 4.1 |
| NDF, % | 5.8 | 7.5 | 8.8 |
| Crude fiber, % | 1.5 | 2.1 | 2.4 |
| Crude fat, % | 2.2 | 2.3 | 2.3 |
| Lactose % | 20.0 | 8.0 | 0 |
| Phytase, U/kg | 0 | 500 | 500 |
| SID Lys, % | 1.41 | 1.35 | 1.29 |
| SID Thr, % | 0.85 | 0.81 | 0.77 |
| SID Met, % | 0.50 | 0.50 | 0.49 |
| SID TSAA, % | 0.82 | 0.78 | 0.75 |
| SID Trp, % | 0.25 | 0.23 | 0.23 |
| SID Ile, % | 0.79 | 0.76 | 0.72 |
| SID Val, % | 0.92 | 0.93 | 0.89 |
| SID Arg, % | 0.94 | 1.10 | 1.13 |
| SID His, % | 0.45 | 0.46 | 0.44 |
| SID Leu, % | 1.52 | 1.51 | 1.46 |
| SID Phe % | 0.79 | 0.82 | 0.82 |
| SID Phe + Tyr, % | 1.36 | 1.39 | 1.36 |
| Ca, % | 0.82 | 0.78 | 0.70 |
| STTD of P,% | 0.43 | 0.40 | 0.33 |
| Na, % | 0.50 | 0.35 | 0.29 |
| Cl, % | 0.63 | 0.43 | 0.34 |
| Ca:STTD P | 1.91 | 1.94 | 2.12 |
| SID Lys:ME | 4.23 | 4.04 | 3.86 |
| SID Lys:ME | 5.43 | 5.36 | 5.22 |

[0425] Feed Manufacturing—Diets are manufactured under the supervision of BRRS personnel. Feed manufacturing records for the manufacture of all test feeds, as well as each diet formulation, is included in the study data file. Diets are analyzed for proximate analysis of crude protein, ash, moisture, sodium, calcium, zinc, copper, and phosphorous. For each feeding phase, a master batch is mixed and all ten treatment diets are derived.

[0426] Feed Manufacturing Records—All feed manufacturing batch records are included in the final data file.

[0427] Feed Labelling—The feed is stored in 25-kg capacity new feed sacks labeled with study number (ELAVV200241), feed ID (Phase 1, Phase 2, or Phase 3), treatment ID (T01, T02, etc.) and treatment color code.

[0428] Feed samples—One feed sample of about 500 g from each diet and phase is collected, labeled, and stored at BRRS. For T01 and T02, a second feed sample is sent to Minnesota Valley Testing Laboratory (MVTL) for proximate analysis.

[0429] Proximate Analysis—Feed samples from T01 and T02 are sent for analysis of crude protein, moisture, ash, Na, Ca, P, Zn, Cu at Minnesota Valley Testing Laboratory (MVTL)

[0430] Statistical Analysis

[0431] Variable Classification—Variable calculations are made relative to phases, where the phases are defined according to the study phases as indicated above in Table 26.

[0432] Key Variables

[0433] Growth performance efficiency (average daily gain, average daily feed intake, gain efficiency) is calculated and evaluated for each study phase and overall. Individual feed intake is calculated according the procedure of Lee et al., 2016. Removals and mortality by system and clinical sign is documented by treatment. General health records (e.g. diarrhea, respiratory problems, etc.) is documented by treatment and cause of illness.

[0434] A listing of continuous variables and their calculation is provided below in Table 32.

TABLE 32

| List of Continuous Variables | Calculation |
|---|---|
| Individual Feed Intake maintenance (IFIm), kg | (197 × BW^{0.60} × d) ÷ MEf |
| Pen Feed Intake maintenance (PFIm), kg | ${\sum }_{j = 1}^{n} {IFIm}_{j}$ |
| Pen Feed Intake gain, (PFIg), kg | Total PFI-PFIm |
| Individual BW Gain (IBWG), kg | Final BW-Initial BW |
| Pen BW Gain (PBWG), kg | ${\sum }_{j = 1}^{n} {IBWG}_{j}$ |
| Individual Feed Intake gain (IFIg), kg | PFIg × (IBWG ÷ PBWG) |
| Individual Feed Intake (IFI), kg | IFIm + IFIg |
| Average Final Body Weight | $\frac{Σ Individual Live Body Weight on d 42}{Number of animals alive on d 42}$ |
| Individual Average Daily Gain (Phase 1) (d 0 to 7) | $\frac{Σ IBGW ( d 0 to 7 )}{Number of animals alive ( d 0 to 7 )}$ |
| Individual Average Daily Gain (Phase 2) (d 7 to 21) | $\frac{Σ IBGW ( d 7 to 21 )}{Number of animals alive ( d 7 to 21 )}$ |
| Individual Average Daily Gain (Phase 3) (d 21 to 42) | $\frac{Σ IBGW ( d 21 to 42 )}{Number of animals alive ( d 21 to 42 )}$ |
| Individual Average Daily Gain (Overall) (d 0 to 42) | $\frac{Σ ( Individual BW on d 0 - Individual BW on d 42 )}{Number of animals alive on d 42}$ |
| Individual Average Daily Feed Intake (Phase 1) (d 0 to 7) | $\frac{Σ IFI ( d 0 to 7 )}{Number of animals alive ( d 0 to 7 )}$ |
| Individual Average Daily Feed Intake (Phase 2) (d 7 to 21) | $\frac{Σ IFI ( d 7 to 21 )}{Number of animals alive ( d 7 to 21 )}$ |
| Individual Average Daily Feed Intake (Phase 3) (d 21 to 42) | $\frac{Σ IFI ( d 21 to 42 )}{Number of animals alive ( d 21 to 42 )}$ |
| Individual Average Daily Feed Intake (Overall) (d 0 to 42) | $\frac{Σ IFI ( d 0 to 42 )}{Number of animals alive ( d 0 to 42 )}$ |
| Individual Gain Efficiency (Phase 1) (d 0 to 7) | $\frac{Σ IBWG ( d 0 to 7 )}{Σ IFI ( d 0 to 7 )}$ |
| Individual Gain Efficiency (Phase 2) (d 7 to 21) | $\frac{Σ IBWG ( d 7 to 21 )}{Σ IFI ( d 7 to 21 )}$ |
| Individual Gain Efficiency (Phase 3) (d 21 to 42) | $\frac{Σ IBWG ( d 21 to 42 )}{Σ IFI ( d 21 to 42 )}$ |
| Individual Gain Efficiency (Overall) (d 0 to 42) | $\frac{Σ IBWG ( d 0 to 42 )}{Σ IFI ( d 0 to 42 )}$ |
| Individual Feed Conversion Ratio (FCR, Phase 1, d 0 to 7) | $\frac{Σ IFI ( d 0 to 7 )}{Σ IBWG ( d 0 to 7 )}$ |
| Individual Feed Conversion Ratio (FCR, Phase 2, d 7 to 21) | $\frac{Σ IFI ( d 7 to 21 )}{Σ IBWG ( d 7 to 21 )}$ |
| Individual Feed Conversion Ratio (FCR, Phase 3, d 21 to 42) | $\frac{Σ IFI ( d 21 to 42 )}{Σ IBWG ( d 21 to 42 )}$ |
| Individual Feed Conversion Ratio (FCR, Overall, d 0 to 42) | $\frac{Σ IFI ( d 0 to 42 )}{Σ IBWG ( d 0 to 42 )}$ |
| Pen Average Daily Fecal Score (Phase 1) (d 0 to 7) | $\frac{Σ daily pen fecal score ( d 0 to 7 )}{7 ( d 0 to 7 )}$ |
| Pen Average Daily Fecal Score (Phase 2) (d 7 to 21) | $\frac{Σ daily pen fecal score ( d 7 to 21 )}{14 ( d 7 to 21 )}$ |
| Pen Average Daily Fecal Score (Phase 3) (d 21 to 42) | $\frac{Σ daily pen fecal score ( d 21 to 42 )}{21 ( d 21 to 42 )}$ |
| Pen Average Daily Fecal Score (Overall) (d 0 to 42) | $\frac{Σ daily pen fecal score ( d 0 to 42 )}{42 ( d 0 to 42 )}$ |

Where:
d is number of days in each diet phase
BW is the body weight of a pig in kg
MEf is the feed metabolizable energy in kcal/kg
Total PFI is the amount of feed added to a pen during each feeding phase
n is the number of pigs in a pen

[0435] Data Analysis—Variables are analyzed using a two-way analysis of variance using JMP version 12.0 or higher (SAS Institute, Inc., Cary NC) with treatment as a fixed effect. Block may be included in the model as a random effect. All pair-wise comparisons are evaluated using a two-tail t-test. Pen and pig serve as the experimental unit for growth performance, and pen is the experimental unit for fecal scores.

[0436] A swine necropsy key and findings/presumptive diagnosis for the study is provided in Table 33.

TABLE 33

System
CDV = Cardiovascular
EAR = Ear and Labyrinth
EYE = Eyes
GEN = General
GI = Gastrointestinal
INTG = Skin and Integument
MS = Musculoskeletal
NEU = Neurological
RESP = Respiratory
Tract RNU = Renal and
Urinary SYS = Systemic
OTHER = Other
Findings/Presumptive Diagnosis¹
CDV
ENDO = Endocarditis
MABS = Myocardial Abscess
PERI = Pericarditis
EAR
OTSM = Otitis Media
EYE
CHOR = Chorioretinitis
KCNJ = Keratoconjunctivitis
GEN
ASPH = Asphyxiation
DEHY = Dehydration
HEAT = Heat Stress
NOGL = No Gross Lesions
STVN = Starvation
GI
ENTS = Enteritis
ETOX = Enterotoxemia
GULC = Gastric Ulcer
HINF = Hepatic Infarction
IMPN = Impaction
IPAR = Internal Parasite Infestation
NENT = Necrotic Enteritis
RPRO = Rectal Prolapse
INTG
ABS = Abscess
DER = Dermatitis
ECTO = Ectoparasite Infestation
LAC = Laceration
RING = Ringworm
PAPL = Papillomatosis (warts)
MS
DISJ = Dislocated Joint
DSCH = Dyschondroplasia
FBON = Fractured Bone
LMNS = Laminitis
MNEC = Muscle Necrosis
MYS = Myositis
OSTM = Osteomyelitis
SEPT = Septic Arthritis
SPDL = Spondylolisthesis
SPLY = Splay Leg
TNSN = Tendonitis/Tenosynovitis
TRMA = Trauma
NEU
BABS = Brain/Spinal Cord Abscess
CINF = Cerebral Infarction
GMNC = Gray Matter Necrosis
RESP
BPNM = Bronchopneumonia
BRCH = Bronchitis
DPTH = Diptheria
PABS = Pulmonary Abscessation
PLRS = Pleuritis
RHNO = Rhinotracheitis
SNTS = Sinusitis
RNU
NEPH = Nephritis
PYEL = Pyelonephritis
RINF = Renal Infarction
ULTH = Urolithiasis
SYS
PTNT = Peritonitis
SPTM = Septicemia
OTHER
OTHER = used for any unlisted systems or findings/diagnosis
¹Findings were not confirmed by culture and/or isolation, but gross lesions were consistent with a particular disease or condition

[0437] Results

[0438] In accordance with the treatments and doses and the study protocol outlined above, various Bacillus strain combinations were tested in the domestic pig Sus scrofa for their effects on and ability to reduce the impact of post weaning diarrhea in pigs, as measured by fecal scores and various aspects of feed intake, penn weight and weight gain. The data and analysis is depicted in various figures.

[0439] Fecal scores, using a 1 (none) to 5 (severe) scoring system as provided above, were assessed for various treatments and doses, particularly of combinations of Bacillus bacteria strains. Results are graphed in FIG. 21A and tabulated in FIG. 21B. Comparisons of each of the following were assessed: T01 (control—no antibiotic), T02 (conventional—Tylan antibiotic), T08 (BSUB20025+BSUB19105+BAMY19006), T09 (BSUB19105+BAMY19006+BAMY20071), T10 (BSUB20025+BAMY20071), T11 (BSUB20025+BSUB19105) and T12 (BSUB19105+BAMY19006). The T09 combination of strains BSUB19105+BAMY19006+BAMY20071 (105+6+71) showed improvement and reduced fecal scores versus the control.

[0440] Pen performance was evaluated for several parameters. Average daily gain (ADG) in grams (g) body weight of pen animals is graphed for various treatments in FIG. 22A. Average daily feed intake (ADFI) in grams (g) is graphed for various treatments in FIG. 22B. The gain:feed results are graphed in FIG. 22C. FIG. 22D provides an overall comparison of final body weight (BW), ADG, ADFI and Gain:Feed ratio versus control, with better % vs control indicated by a color coding (blue better, red worse vs control). T01 conventional (antibiotic) provided the highest final body weight, ADFG and ADFI versus control. T12 (105+6) and T09 (105+6+71) both showed improvement in final BW and in ADG versus control. T12 (105+6) was also somewhat improved versus control in ADFI. Gain:Feed was improved with T09 (105+6+71), T10 (25+71) and T08 (25+105+6), even over conventional feed. T12 showed about the same improvement in Gain:Feed as conventional versus control.

[0441] Individual performance was evaluated for several parameters. Average daily gain (ADG) in grams (g) body weight of individual animals is graphed for various treatments in FIG. 23A. Average daily feed intake (ADFI) in grams (g) is graphed for various treatments in FIG. 23B. The gain:feed results are graphed in FIG. 23C. FIG. 23D provides an overall comparison of final body weight (BW), ADG, ADFI and Gain:Feed ratio versus control, with better % vs control indicated by a color coding. T01 conventional (antibiotic) provided the highest final body weight, ADFG and ADFI versus control. T12 (105+6) and T09 (105+6+71) both showed some improvement in final BW and in ADG versus control. T12 (105+6) was also somewhat improved versus control in ADFI. Gain:Feed was most improved with T09 (105+6+71) and T10 (25+71) even over conventional feed. T08 (25+105+6) showed about the same improvement in Gain:Feed as conventional versus control.

[0442] The study results show that bacilli were more effective in smaller piglets. The above performance parameters were evaluate for smaller piglets vs larger piglets. FIG. 24A graphs ADG under the treatment conditions for phase 1 in animals 4-5.67 kg body weight and in larger animals 5.67-7.91 kg. In the smaller piglets, T09 (strains 105+6+71), T11 (strains 25+105) and T12 (strains 105+6) each performed as well as piglets with conventional antibiotic T02. Overall results in smaller piglets (3.9-5.7 kg) and in larger piglets (5.7-7.9 kg) are depicted and color coded vs control (blue being better, red being worse) in FIG. 24B. Again, in smaller piglets, T09 (strains 105+6+71), T11 (strains 25+105) and T12 (strains 105+6) each performed well and comparable or nearly comparable to small piglets with conventional antibiotic T02.

[0443] Additional results showing more effectiveness of bacilli in smaller piglets are provided in FIGS. 25A and 25B. Again, a combination of strains 105+6 (T12) or of strains 105+6+71 (T09) provided average daily gain (ADG) on par with conventional (Tylan antibiotic) in small piglets (4-kg body weight).

[0444] A similar weight-dependent effect was observed in a further study additionally conducted as depicted in FIG. 26. In this study individual Bacillus strains were evaluated and administered alone. All individual Bacillus strains tested demonstrated an increase over control (+18% to +29% vs control) in small piglets (4.33-6.26 kg body weight). B. amyloliquefaciens strains 24 and 64 were evaluated alone and showed increased ADG vs control. B. subtilis strains 105, 25 and 66 were evaluated alone and showed increased ADG.

[0445] These studies demonstrate reduced post-weaning diarrhea in an improvement in fecal scores in piglets treated with Bacillus strains and an overall improvement in individual and in pen performance, including in aspects of average daily gain (ADG), final body weight (BW), average daily food intake (ADFI) and gain:feed ratios in animals treated with or administered Bacillus strains. These improvements were most significant in small piglets with a lower body weight—in the range of 4 kg or a bit less to 6 kg or less. A combination of Bacillus strains B. subtilis 105 (BSUB19105) and B. amyloliquefaciens 6 (BAMY19006) and a combination of Bacillus strains B. subtilis 105 (BSUB19105), B. amyloliquefaciens 6 (BAMY19006) and B. amyloliquefaciens 71 (BAMY20071) demonstrated effectiveness on the order of conventional (antibiotic), particularly in small piglets.

### Example 15

### Evaluation and Dose Titration in Piglets

[0446] A combination of Bacillus strains B. subtilis 105 (BSUB19105), B. amyloliquefaciens 6 (BAMY19006) and B. amyloliquefaciens 71 (BAMY20071)— denoted 105+6+71 was further evaluated in in vivo piglet studies. The studies were conducted in line with and in accordance with the protocols described and detailed in Example 14. A dose titration of the B. subtilis plus B. amyloliquefaciens strain combination 105+6+71 was conducted. The 105+6+71 (noted as Blend B) was compared to a distinct combination of alternative bacteria (noted as Blend A) in a phased study in line with the study conducted in Example 14. Phase 1 represented days 0 to 7, Phase 2 represents days 7 to 21 and Phase 3 represents days 21 to 42, as depicted above in TABLE 26. Control animals T01 were without antibiotic or pharmacological levels of Zn and T02 animals were administered Zn from ZnO. In testing T03 through T08, total doses (CFU/g) of Blend A or of Blend B (strains 105+6+71) of either 75K (75,000), 150 K (150,000) or 300 K (300,000) were administered. A description of the study is tabulated in FIG. 27.

[0447] Pen performance days 0-21 was again evaluated for several parameters. Average daily feed intake (ADFI) in grams (g) is graphed for the various treatments in FIG. 28A. Average daily gain (ADG) in grams (g) body weight of pen animals is graphed for the various treatments in FIG. 28B. The gain:feed results are graphed in FIG. 28C. Blend B (strains 105+6+71) performed at least as well and in most instances better than an alternate Blend A. The optimal dose of Blend B was lower at 75K. In gain:feed the lower 75K dose of 105+6+71 strains provided the best results of any blend or dose and was near that of the ZnO administration.

[0448] The optimal Blend B dose of 75K was compared directly with the higher optimal dose of 150 K of Blend A. The results are depicted in FIG. 29. Average daily feed intake (ADFI) for the pen in grams (g) is graphed for the control versus the Blend A and Blend B optimum doses in FIG. 29A. Average daily gain (ADG) for the pen in grams (g) body weight of pen animals is graphed for the various treatments in FIG. 29B. The gain:feed for the pen results are graphed in FIG. 29C. FIG. 29D provides a comparison of the ADG for the pigs. The results are compared quantitatively in FIG. 29E. Both Blend A and Blend B performed better than the control, and notably the lower dose of Blend B (105+6+71) performed the best overall.

[0449] Bodyweight uniformity at Day 21 was assessed with Blend B and Blend A at each of the 150 K and 300 K doses and is depicted in FIG. 30. The percentage (%) of pigs with bodyweight within 15% of pen average is provided. Again, the Blend B lower dose 75K performed the best.

[0450] In summary, Dose Titration Results (first 21 days)

[0451] Blend A (150 k CFU/g) improved ADG by 14% and G:F by 3.9%. Blend B (75 k CFU/g) improved ADG by 18% and G:F by 6.8%. Blend B improved BW uniformity, while Blend A did not.

[0452] Previous POC Results (42 days)

[0453] Blend A (100 CFU/g) improved ADG by 1.7% and G:F by 6.7%. Blend B (100 CFU/g) improved ADG by 3.2% and G:F by 5.2%

[0454] Conclusions

[0455] Blend B is showing slightly better efficacy than Blend A at a lower optimal dose

[0456] A similar dose response was determined by comparison of 75K, 150 K and 300 K doses of strain combination 105+6+71 in poultry when compared to swine (piglets). These results are depicted in FIG. 31.

[0457] To confirm the compatibility of the strains B. subtilis 105 (BSUB19105), B. amyloliquefaciens 6 (BAMY19006), B. amyloliquefaciens 24 (strain ELA191024) and B. amyloliquefaciens 71 (BAMY20071) a bacteria compatibility test was conducted. Combinations of two of each of the strains were assessed. The results are shown in FIG. 32. One strain is streaked perpendicular to the other strain. A clearance zone in the intersection of the strains suggests strain incompatibility. Compatibility of the two strains tested is demonstrated if there is no clearance zone. Each of strains B. subtilis 105 (BSUB19105), B. amyloliquefaciens 6 (BAMY19006), B. amyloliquefaciens 24 (strain ELA191024) and B. amyloliquefaciens 71 (BAMY20071) are compatible with one another.

### Example 16

### Evaluation and Dose Titration in Chickens

[0458] A combination of Bacillus strains B. subtilis 105 (BSUB19105), B. amyloliquefaciens 6 (BAMY19006) and B. amyloliquefaciens 71 (BAMY20071)— denoted 105+6+71 was further evaluated in in vivo broiler chicken studies. The studies were conducted in line with and in accordance with the protocols described and detailed in Example 13.

[0459] A dose titration study was conducted. The treatment groups and dosing for the different groups of animals in the study are depicted in TABLE 34. Treatment groups T01 and T02 were given a basal diet. T02 was challenged with necrotic enteritis challenge as were treatment groups T03-T08. For the necrotic enteritis (NE) challenge, animals were administered by gavage (through a tube leading down the throat to the stomach) 10,000 oocytes of Eimeria maxima (E. maxima). Note that treatment group T03 was given BMD (Bacitracin Methylene Disalicylate), a Type A medicated article (antibiotic mixture) used for the prevention of necrotic enteritis, to maintain increased weight gain and to improve feed efficiency in poultry. 50 K, 100 K, 200 K, 400 K and 600 K doses (CFU/g) of strain combination 105+6+71 (B. subtilis 105 (BSUB19105), B. amyloliquefaciens 6 (BAMY19006) and B. amyloliquefaciens 71 (BAMY20071)) were administered in groups T04, T05, T06, T07 and T08 respectively.

TABLE 34

| | | | Total Dose | Dose/Strain | | | |
|---|---|---|---|---|---|---|---|
| TG | Challenge | Diet | (CFU/g) | (CFU/g) | Pens | Birds | Total |
| T01 | None | Basal | 0 | 0 | 15 | 18 | 270 |
| T02 | NE | Basal | 0 | 0 | 15 | 18 | 270 |
| T03 | NE | BMD | 0 | 0 | 15 | 18 | 270 |
| T04 | NE | DFM | 50k | 17k | 15 | 18 | 270 |
| T05 | NE | DFM | 100k | 33k | 15 | 18 | 270 |
| T06 | NE | DFM | 200k | 67k | 15 | 18 | 270 |
| T07 | NE | DFM | 400k | 133k | 15 | 18 | 270 |
| T08 | NE | DFM | 600k | 200k | 15 | 18 | 270 |
| | | | | | 120 | | 2,160 |

[0460] TABLE 35 depicts the Effect sizes detectable for pairwise combinations (P<0.05, 80% Power, One-tailed test).

TABLE 35

| | | | | Lesion |
|---|---|---|---|---|
| | ADG | FCR | EBI | Scores |
| 6 Doses (n=15) | 5.6% | 3.3% | 11.7% | 60.0% |
| DLL Target | | 3.6% | | |
| Previously | 2-8% | 0-8% | 0-16% | 14-34% |
| Observed | | | | |

[0461] TABLE 36 depicts the Simulated Power for Linear Regression of ADG (Average Daily Gain) (+1% ADG per 100 CFU, p<0.05).

TABLE 36

| Design | Group N | Total N | Power | Avg. R |
|---|---|---|---|---|
| 6 Doses | 15 | 90 | 98.8% | 0.437 |

[0462] On Day 23, fecal oocyst counts of E. maxima were evaluated. The results are depicted in FIG. 33A and B. Doses of 100 K and 600 K showed significance at ***<0.001, the 50 K dose showed ome effectiveness at ** p<0.01 (FIG. 33A). 50 K, 100 K and 600 K doses of 105+6+71 demonstrated greater reduction in the number of oocytes per gram feces vs the BMD antibiotic mix (FIG. 33B).

[0463] Evaluations of mortalities due to necrotic enteritis at days 22-27 are shown in FIG. 34 A-C. Again the 50 K and 100 K doses provided the greatest reduction in % mortality compared to control. Oocyte counts were correlated with NE mortality. Results are provided in FIG. 35A-B.

[0464] Of the doses evaluated, the optimal dose was determined to be 100 K CFU/g or 105+6+71. Efficacy of the Bacillus combination at the optimal 100 K CFU/g was further evaluated. Unchallenged, and challenged control, BMD or Bacillus 100 K were assessed, with the results depicted in FIG. 36A-E. Mortality, FCR (feed conversion ratio), mortality-adjusted FCR and EBI (European Broiler Index) were determined. The Bacillus combo significantly reduced mortality % and FCR. The EBI was significantly increased with the Bacillus probiotic combination.

[0465] Unadjusted performance and ADFI (average daily feed intake), ADG (average daily gain) and FCR (feed conversion ratio) for unchallenged, control, BMD administered, and the Bacillus 105+6+71 combination at doses 50 K, 100 K, 200 K, 400 K and 600 K is provided in FIG. 37. Mortality adjusted performance and MA-ADFI (average daily feed intake), MA-ADG (average daily gain) and MA-FCR (feed conversion ratio) for unchallenged, control. BMD administered, and the Bacillus 105+6+71 combination at doses 50 K, 100 K, 200 K, 400 K and 600 K is provided in FIG. 38.

[0466] Unchallenged, control, BMD administered, and the Bacillus 105+6+71 combination at doses 50 K, 100 K, 200 K, 400 K and 600 K evaluated for total production and Total Live Weight and EBI (European Broiler Index) is depicted in FIG. 39A-B. Again the Bacillus strain 105+6+71 combination showed the best performance and production at the 100 K dose.

[0467] Unadjusted performance and % mortality, ADFI, ADG and FCR for unchallenged, control, BMD administered, and the Bacillus 105+6+71 combination at doses 50 K, 100 K, 200 K, 400 K and 600 K is provided in FIG. 40. Mortality adjusted performance and % mortality, MA-ADFI, MA-ADG and MA-FCR for unchallenged, control, BMD administered, and the Bacillus 105+6+71 combination at doses 50 K, 100 K, 200 K, 400 K and 600 K is provided in FIG. 41.

[0468] Feed efficiency dose response was assessed and the results are shown on FIG. 42A-C for FCR, MA-FCR and EBI.

### Example 17

### Metabolite and Genome Analysis of Bacillus Strains

[0469] Metabolite analysis was conducted on the strains ELA1901105 (also denoted strain 105), ELA2002071 (also denoted strain 71) or ELA2001006 (also denoted strain 6). These strains make up a preferred combination of probiotic Bacillus strains.

[0470] TABLE 37 provides analysis of the presence or absence of certain natural antibiotics/antibacterials or bacteriocins in the 105 (ELA1901105), 71 (ELA2002071) and 6 (ELA2001006) strains.

TABLE 37

| Class | ELA191105 | ELA202071 | ELA191006 |
|---|---|---|---|
| 132.2; LCI | Absent | Present | Present |
| Lanthipeptide_class_Il | Absent | Absent | Present |
| 266.1; Amylocyclicin | Absent | Present | Present |
| 318.1; ComX1 | Absent | Absent | Present |
| 216.2; Subtilosin_(Sbox) | Present | Absent | Absent |
| 492.1; Competence | Present | Absent | Absent |
| 490.1; Pumilarin | Absent | Absent | Absent |
| 225.2; UviB | Absent | Absent | Absent |
| 294.1; Plantathiazolicin_(Plantazolicin) | Absent | Present | Absent |
| 54.1; LichenicidinVK21A1_(Lichenicidin_A1) | Absent | Absent | Absent |
| 121.1; Sporulation-killingfactor_skfA | Absent | Absent | Absent |
| 321.1; ComX4 | Absent | Present | Absent |
| 145.1; Subtilosin_A | Absent | Absent | Absent |
| 127.1; Sublancin_168 | Absent | Absent | Absent |

[0471] Small peptides have powerful biological activities ranging from antibiotic to immune suppression. Some of these peptides are synthesized by Non Ribosomal Peptide Synthetases (NRPS) (Challis G L and Naismith J H (2004) Cur Opin Struct Biol 14(6):748-756). While the vast majority of peptide bond formation is catalyzed by ribosomes, the catalysis of peptide bond formation by NRPS is of importance and relevance. Some of the most well known examples of molecules made by NRPS illustrate the importance of NRPS systems. The antibiotic vancomycin and its analogues have very complex structures made by NRPS and associated enzymes. Indeed, almost all peptide based antibiotics are made by NRPS. Chelation of iron by bacteria is vital for their survival and is often a virulence determinant in pathogens. NRPS synthesize macrocycles such as enterobactin, which have an extraordinary high iron affinity. Cyclosporin, an immune suppressor and the potent anti tumour compound bleomycin are both made by NRPS. The molecules made by NRPS are often cyclic, have a high density of non-proteinogenic amino acids, and often contain amino acids connected by bonds other than peptide or disulfide bonds. NRPS are now known to be very large proteins and, despite the obvious complexity of the products, consist of a series of repeating enzymes fused together.

[0472] The non-ribosomal peptide synthetases are modular enzymes that catalyze synthesis of important peptide products from a variety of standard and non-proteinogenic amino acid substrates. Within a single module are multiple catalytic domains that are responsible for incorporation of a single residue. After the amino acid is activated and covalently attached to an integrated carrier protein domain, the substrates and intermediates are delivered to neighboring catalytic domains for peptide bond formation or, in some modules, chemical modification. In the final module, the peptide is delivered to a terminal thioesterase domain that catalyzes release of the peptide product. (Miller B R and Gulick A M (2016) Methods Mol Biol 1401:3-29).

[0473] The probiotic Bacillus strains of the invention include numerous NRPS and also predicted proteins which are expected to be synthesized by NRPS. A tabulation of certain of certain proteins is provided in TABLE 38.

TABLE 38

| ELA1901105 | ELA2002071 | ELA2001006 |
|---|---|---|
| NRPS | NRPS | NRPS |
| NRPS | NRPS | NRPS |
| | NRPS | NRPS |
| | NRPS | |
| NRPS, betalactone | | |
| CDPS | | |
| head_to_tail, sactipeptide | | |
| transAT-PKS, PKS- | | |
| like, T3PKS, transAT-PKS- | | |
| like, NRPS | | |
| | transAT-PKS, T3PKS, transAT- | transAT-PKS, T3PKS, transAT- |
| | PKS-like, NRPS | PKS-like, NRPS |
| | | NRPS, transAT-PKS |
| | NRPS, bacteriocin | NRPS, bacteriocin |
| | NRPS, transAT-PKS, betalactone | NRPS, transAT-PKS, betalactone |
| | PKS-like | PKS-like |
| | transAT-PKS | transAT-PKS |
| | transAT-PKS-like, transAT-PKS | |
| | | transAT-PKS-like |
| | | transAT-PKS-like |
| | | lanthipeptide |
| | LAP | |
| terpene | terpene | terpene |
| terpene | terpene | terpene |
| T3PKS | T3PKS | T3PKS |
| other | other | other |

[0474] The presence of certain predicted proteins and secondary metabolites is indicated with the number of predicted such type proteins provided in parenthesis below in TABLE 39.

TABLE 39

| | ELA191105 | ELA2002071 | ELA191006 |
|---|---|---|---|
| | (strain 105) | (strain 71) | (strain 6) |
| CDPS | Present (1) | — | — |
| LAP | — | Present (1) | — |
| NRPS | Present (2) | Present (2) | Present (1) |
| NRPS,PKS- | Present (1) | — | — |
| like, T3PKS, transAT- | | | |
| PKS, transAT-PKS-like | | | |
| NRPS,T3PKS, transAT- | — | Present (1) | Present (1) |
| PKS,transAT-PKS-like | | | |
| NRPS,bacteriocin | — | Present (1) | Present (1) |
| NRPS,betalactone | Present (1) | — | — |
| NRPS, betalactone, | — | Present (1) | Present (1) |
| transAT-PKS | | | |
| NRPS, transAT-PKS | — | Present (1) | Present (1) |
| PKS-like | — | Present (1) | Present (1) |
| T3PKS | Present (1) | Present (1) | Present (1) |
| head_to_tail, | Present (1) | — | — |
| sactipeptide | | | |
| lanthipeptide | — | — | Present (1) |
| terpene | Present (2) | Present (2) | Present (2) |
| transAT-PKS | — | Present (1) | Present (1) |
| transAT-PKS, | — | Present (1) | Present (1) |
| transAT-PKS-like | | | |
| other | Present (1) | Present (1) | Present (1) |

[0475] No plasmids were identified in any of the strains ELA1901105 (also denoted strain 105), ELA2002071 (also denoted strain 71) or ELA2001006 (also denoted strain 6) by analysis of the whole genome sequences.

[0476] Analysis of the predicted proteins from the whole genome sequencing of the Bacillus strains was conducted. Certain results are provided below in TABLE 40.

TABLE 40

| Database | | | |
|---|---|---|---|
| #FILE | ELA191105 | ELA202071 | ELA191006 |
| NUM_FOUND | 5 | 3 | 5 |
| aadK_1 | 99.77 | — | 75.20 |
| fosB1_1 | 96.16 | — | — |
| mph(K)_1 | 100.00 | — | 86.43 |
| tet(L)_5 | 100.00 | 100.00 | 100.00 |
| tetB(60)_1 | 33.68 | — | — |
| cfr(B)_3 | — | 100.00 | 98.67 |
| fosB 5 | — | 97.36 | 97.36 |

[0477] Further analysis of predicted proteins from the whole genome sequencing of the Bacillus strains was conducted. Certain results are provided below in TABLE 41.

TABLE 41

| | VFDB | | |
|---|---|---|---|
| Database | ELA1901105 | ELA2002071 | ELA2001006 |
| #FILE | (strain 105) | (strain 71) | (strain 6) |
| NUM_FOUND | 19 | 21 | 20 |
| bslA/yuaB | 100.00 | 74.73 | 74.73 |
| cap8D | 32.84 | 25.60 | 25.66 |
| capB | 64.23 | 67.46 | 67.46 |
| capC | 99.78 | 100.00 | 100.00 |
| cdsN | 40.86 | 41.01 | 41.08 |
| clpC | 95.01 | 95.29 | 95.29 |
| clpE | 64.28 | 25.56; 21.61 | 21.61; 25.56 |
| clpP | 93.47 | 92.13 | 92.13 |
| cps41 | 72.68 | — | — |
| cpsA | 32.84 | 32.60 | 32.60 |
| cpsJ | 33.18 | 28.79 | 24.40 |
| essC | 15.72 | — | 16.31 |
| fliP | 25.58 | 25.58 | 25.58 |
| hasC | 42.73 | 27.32 | 27.32 |
| htpB | 96.67 | 97.64 | 97.40 |
| katA | 65.87 | 52.54 | 52.54 |
| IplA1 | 49.60 | 76.71 | 45.98 |
| oatA | 22.69 | — | — |
| ureB | 80.00 | 79.01 | — |
| cap8P | — | 55.58 | 55.50 |
| capA | — | 20.06 | 20.06 |
| flhA | — | 17.93 | 17.93 |
| pvdL | — | 1.73 | 1.75; 1.75 |
| pvdD | — | 4.97; 2.42 | — |

[0478] Further analysis of predicted antioxidant proteins from the sequence analysis of the Bacillus strains was conducted. Certain results are provided below in TABLE 42.

TABLE 42
Antioxidant prediction. Putative genes encoding antioxidant in the genomes of three Bacillus strains

| | | | | B. subtilis |
|---|---|---|---|---|
| | | B. | B. | PTA-86 |
| | | amyloliquefaciens | amyloliquefaciens | (strain 105; |
| Description | Accession Number | BAMY006 | BAMY071 | BSUB105) |
| Alkyl hydroperoxide reductase C | UniRef100_P80239 | PRESENT | PRESENT | NA |
| | UniRef100_O34564 | NA | NA | PRESENT |
| | UniRef100_P80239 | NA | NA | PRESENT |
| Glutathione peroxidase BsaA | UniRef100_P40581 | NA | PRESENT | NA |
| Hydroperoxy fatty acid reductase | UniRef100_P40581 | PRESENT | NA | NA |
| gpx1 | UniRef100_P40581 | NA | NA | PRESENT |
| Organic hydroperoxide resistance | UniRef100_O34777 | PRESENT | NA | NA |
| transcriptional regulator | UniRef100_O34777 | PRESENT | NA | NA |
| | UniRef100_O34777 | NA | NA | PRESENT |
| Peroxide operon regulator | Q2G282 | PRESENT | PRESENT | NA |
| | Q2G282 | NA | NA | PRESENT |
| Sporulation thiol-disulfide | UniRef100_O31687 | PRESENT | PRESENT | NA |
| oxidoreductase A | UniRef100_O31687 | NA | NA | PRESENT |
| Superoxide dismutase [Mn] | UniRef100_P49114 | PRESENT | PRESENT | NA |
| | UniRef100_P49114 | NA | NA | PRESENT |
| Thiol peroxidase | UniRef100_P80864 | PRESENT | PRESENT | NA |
| | UniRef100_P80864 | NA | NA | PRESENT |
| Thiol-disulfide oxidoreductase | UniRef100_P35160 | PRESENT | PRESENT | NA |
| ResA | UniRef100_O31820 | PRESENT | PRESENT | NA |
| | UniRef100_O31820 | NA | NA | PRESENT |
| | UniRef100_P35160 | NA | NA | PRESENT |
| Thiol-disulfide oxidoreductase | UniRef100_O31699 | PRESENT | PRESENT | NA |
| Yku V | UniRef100_O31699 | NA | NA | PRESENT |
| Vegetative catalase | UniRef100_Q64405 | PRESENT | PRESENT | NA |
| | UniRef100_Q64405 | NA | NA | PRESENT |

[0479] Toxin or Antitoxin prediction is provided below in TABLE 43.

TABLE 43

| Uniprot_id | description | ELA191105 | ELA202071 | ELA191006 |
|---|---|---|---|---|
| P96621 | Antitoxin EndoAI | BSUB105_00523 | BVEN2071_02649 | BVEN6_02737 |
| | | (also denoted | (also denoted | (also denoted |
| | | JS609_00513) | BVEN71_03490) | BAMY06_03619) |
| P96622 | Endoribonuclease | BSUB105_00524 | BVEN2071_02650 | BVEN6_02738 |
| | EndoA | (also denoted | (also denoted | (also denoted |
| | | JS609_00514) | BVEN71-03489) | BAMY06_03618) |

[0480] Digestive enzymes include enzymes that cleave cell wall or cell membrane components, particularly of bacteria. Among these are for instance lysins which are cell wall hydrolases and often are found on and encoded by bacteriophages. The activities of lysins can be classified into two groups based on bond specificity within the peptidoglycan: glycosidases that hydrolyze linkages within the aminosugar moieties and amidases that hydrolyze amide bonds of cross-linking stem peptides. (Fischetti V A et al (2006) Nat Biotechnol 24(12):1508-11). Predicted digestive enzymes in the Bacillus strains based on sequence analysis are provided in TABLE 44 below.

[0481] Strains were compared for various other components and particularly antimicrobial resistance genes as shown below in TABLE 45.

TABLE 44
Predicted Digestive Enzymes identified in the genomes of B. amyloliquefaciens BAMY006 and
BAMY071, and B. subtilis PTA-85 (percent identity >50 and alignment length percent >90)

| | Accession | B. amyloliquefaciens | B. amyloliquefaciens | B. subtilis |
|---|---|---|---|---|
| Gene Description | Number | BAMY006 | BAMY071 | PTA-86 |
| 1,4-alpha-glucan branching enzyme GlgB | AGA22754.1 | NA | NA | JS609_03093 |
| 3-hydroxyacyl-[acyl-carrier-protein] dehydratase | QAT16354.1 | BAMY06_00446 | BAMY71_00468 | NA |
| FabZ | | | | |
| 50S ribosomal protein L1 | QFI56506.1 | BAMY06_03980 | BAMY71_03857 | NA |
| | QFI56506.1 | NA | NA | JS609_00131 |
| 6-phospho-beta-galactosidase | AWG39028.1 | NA | BAMY71_02679 | NA |
| | QDK89482.1 | BAMY06_02843 | NA | NA |
| 6-phospho-beta-glucosidase GmuD | CDG27774.1 | NA | BAMY71_00235 | NA |
| | QAS06813.1 | NA | NA | JS609_00629 |
| | QDK91913.1 | BAMY06_00219 | NA | NA |
| Alpha-amylase | AIW36239.1 | NA | BAMY71_03662 | NA |
| | QAV82864.1 | NA | NA | JS609_00345 |
| | BAT21551.1 | BAMY06_03784 | NA | NA |
| Alpha-galactosidase | QEK97784.1 | NA | BAMY71_01110 | NA |
| | AIC99339.1 | NA | NA | JS609_03025 |
| | QDK91116.1 | BAMY06_01080 | NA | NA |
| Alpha-galacturonidase | ASB68722.1 | NA | NA | JS609_00767 |
| Arabinoxylan arabinofuranohydrolase | AAD30363.1 | BAMY06_02211 | BAMY71_02039 | NA |
| | AAD30363.1 | NA | NA | JS609_01919 |
| Aryl-phospho-beta-D-glucosidase BglA | CDG26179.1 | NA | BAMY71_01915 | NA |
| | QAW06324.1 | NA | NA | JS609_04055 |
| | QDK90194.1 | BAMY06_02089 | NA | NA |
| Aryl-phospho-beta-D-glucosidase BglC | CDG24623.1 | NA | BAMY71_03632 | NA |
| | ARV97270.1 | NA | NA | JS609_00386 |
| Aryl-phospho-beta-D-glucosidase BglH | CDG27827.1 | NA | BAMY71_00175 | NA |
| | QAS10023.1 | NA | NA | JS609_03976 |
| ATP synthase subunit alpha | QHB16940.1 | BAMY06_00401 | BAMY71_00424 | NA |
| | QHB16940.1 | NA | NA | JS609_03732 |
| Beta-glucanase | ATV02530.1 | NA | BAMY71_00202 | NA |
| | AID00207.1 | NA | NA | JS609_03959 |
| | AYL88759.1 | BAMY06_00186 | NA | NA |
| Beta-hexosaminidase | ANB82474.1 | NA | BAMY71_03774 | NA |
| | QAR91196.1 | NA | NA | JS609_00211 |
| | QDK88534.1 | BAMY06_03899 | NA | NA |
| Cephalosporin-C deacetylase | AHZ14331.1 | NA | BAMY71_03649 | NA |
| | QAS06568.1 | NA | NA | JS609_00359 |
| | QDK88655.1 | BAMY06_03770 | NA | NA |
| Cortical fragment-lytic enzyme | CCP20089.1 | NA | BAMY71_03967 | NA |
| | QBJ80577.1 | NA | NA | JS609_00022 |
| | ATC51419.1 | BAMY06_04090 | NA | NA |
| Cysteine synthase | AYA39814.1 | BAMY06_04025 | BAMY71_03902 | NA |
| | AYA39814.1 | NA | NA | JS609_00087 |
| Demethyllactenocin mycarosyltransferase | CDG24864.1 | NA | BAMY71_03378 | NA |
| | ARV97526.1 | NA | NA | JS609_00617 |
| | QDK88875.1 | BAMY06_03520 | NA | NA |
| Endo-1,4-beta-xylanase A | AQQ16389.1 | NA | BAMY71_00446 | NA |
| | ANJ02848.1 | NA | NA | JS609_01995 |
| | QDK91715.1 | BAMY06_00424 | NA | NA |
| Endoglucanase | CDG26057.1 | NA | BAMY71_02044 | NA |
| | NP_389695.1 | NA | NA | JS609_01916 |
| | QDK90074.1 | BAMY06_02216 | NA | NA |
| General stress protein A | AKF74877.1 | NA | BAMY71_00258 | NA |
| | AGA22706.1 | NA | NA | JS609_03892 |
| | QDK91887.1 | BAMY06_00245 | NA | NA |
| GlcNAc-binding protein A | QEQ03549.1 | BAMY06_02269 | BAMY71_02101 | NA |
| Glucose-1-phosphate adenylyltransferase | QHA28835.1 | NA | NA | JS609_03092 |
| Glucuronoxylanase XynC | CBL17903.1 | BAMY06_02212 | BAMY71_02040 | NA |
| | CBL17903.1 | NA | NA | JS609_01918 |
| Glycogen phosphorylase | AIX08721.1 | NA | NA | JS609_03089 |
| Glycogen synthase | QAW13524.1 | NA | NA | JS609_03090 |
| Intracellular maltogenic amylase | AMR45682.1 | NA | NA | JS609_03485 |
| L-Ala--D-Glu endopeptidase | QGH57794.1 | NA | BAMY71_00874 | NA |
| | QGI53236.1 | NA | NA | JS609_03258 |
| | QGT57119.1 | BAMY06_00853 | NA | NA |
| Maltose-6′-phosphate glucosidase | QGH55793.1 | NA | BAMY71_03140 | NA |
| | QGU25462.1 | NA | NA | JS609_00864 |
| | QDK89133.1 | BAMY06_03235 | NA | NA |
| Melibiose/raffinose/stachyose import permease | QEK97784.1 | BAMY06_01081 | BAMY71_01111 | NA |
| protein MelC | QEK97784.1 | NA | NA | JS609_03024 |
| Membrane-bound lytic murein transglycosylase F | CCP21108.1 | NA | BAMY71_02800 | NA |
| | ASB92721.1 | NA | NA | JS609_01215 |
| | QDK90428.1 | BAMY06_01817 | NA | NA |
| | QDK89432.1 | BAMY06_02899 | NA | NA |
| N-acetyl-alpha-D-glucosaminyl L-malate deacetylase | ATV01518.1 | NA | BAMY71_01790 | NA |
| 1 | AYE64850.1 | NA | NA | JS609_02193 |
| | QEQ03843.1 | BAMY06_01754 | NA | NA |
| N-acetyl-alpha-D-glucosaminyl L-malate synthase | ASS91714.1 | BAMY06_01755 | BAMY71_01791 | NA |
| | ASS91714.1 | NA | NA | JS609_02192 |
| N-acetylglucosamine-6-phosphate deacetylase | QGH58054.1 | NA | BAMY71_00603 | NA |
| | QAS09601.1 | NA | NA | JS609_03525 |
| | QDK91560.1 | BAMY06_00582 | NA | NA |
| | ATV02313.1 | NA | BAMY71_00532 | NA |
| N-acetylglucosaminyldiphosphoundecaprenol N- | AYE66149.1 | NA | NA | JS609_03617 |
| acetyl-beta-D-mannosaminyltransferase | QDK91629.1 | BAMY06_00513 | NA | NA |
| Oleandomycin glycosyltransferase | CDG26160.1 | NA | BAMY71_01935 | NA |
| | CDG29153.1 | NA | BAMY71_02666 | NA |
| | AIC97767.1 | NA | NA | JS609_01294 |
| | AKN14112.1 | NA | NA | JS609_02068 |
| | QDK90176.1 | BAMY06_02109 | NA | NA |
| | QDK89494.1 | BAMY06_02830 | NA | NA |
| Oligo-1,6-glucosidase | AJK66530.1 | NA | BAMY71_00985 | NA |
| | ASZ62584.1 | NA | NA | JS609_03151 |
| | AKD24292.1 | BAMY06_00965 | NA | NA |
| Oligo-1,6-glucosidase 1 | QAW18252.1 | NA | NA | JS609_03479 |
| Pectate lyase | AWG39450.1 | NA | BAMY71_03210 | NA |
| | AFP43210.1 | NA | NA | JS609_00804 |
| | QDK89071.1 | BAMY06_03304 | NA | NA |
| Pectate lyase C | AIC99792.1 | NA | NA | JS609_03519 |
| Pectin lyase | AWG40278.1 | NA | BAMY71_00178 | NA |
| | AKE23786.1 | NA | NA | JS609_01975 |
| | QDK91950.1 | BAMY06_00171 | NA | NA |
| Penicillin-binding protein 1A/1B | AWG38114.1 | NA | BAMY71_01806 | NA |
| | QCU15370.1 | NA | NA | JS609_02178 |
| | QDK90466.1 | BAMY06_01770 | NA | NA |
| Penicillin-binding protein 1F | CDG25272.1 | NA | BAMY71_02930 | NA |
| | QCU14315.1 | NA | NA | JS609_01067 |
| | QDK89310.1 | BAMY06_03028 | NA | NA |
| Penicillin-binding protein 2D | CDG27654.1 | NA | BAMY71_00358 | NA |
| | QGU22813.1 | NA | NA | JS609_03799 |
| | QDK91796.1 | BAMY06_00339 | NA | NA |
| Penicillin-binding protein 4 | AWG37355.1 | NA | BAMY71_00960 | NA |
| | ASB94693.1 | NA | NA | JS609_03174 |
| | QDK91217.1 | BAMY06_00940 | NA | NA |
| | CDG30505.1 | NA | BAMY71_01443 | NA |
| | CDG25227.1 | NA | BAMY71_02976 | NA |
| | QAW40980.1 | NA | NA | JS609_01025 |
| | QDK90813.1 | BAMY06_01407 | NA | NA |
| | QDK89265.1 | BAMY06_03074 | NA | NA |
| Peptidoglycan-N-acetylmuramic acid deacetylase | QEQ05952.1 | BAMY06_03250 | BAMY71_03156 | NA |
| PdaA | AFQ56715.1 | NA | NA | JS609_00844 |
| Peptidoglycan-N-acetylmuramic acid deacetylase | AIX06967.1 | NA | NA | JS609_01282 |
| PdaC | | | | |
| Processive diacylglycerol beta-glucosyltransferase | AKF76366.1 | NA | BAMY71_01851 | NA |
| | QAV83859.1 | NA | NA | JS609_01417 |
| | AYE64796.1 | NA | NA | JS609_02138 |
| | QDK90264.1 | BAMY06_02009 | NA | NA |
| PTS system maltose-specific EIICB component | VEC47756.1 | BAMY06_03233 | BAMY71_03138 | NA |
| | VEC47756.1 | NA | NA | JS609_00866 |
| Pullulanase | AYA43052.1 | NA | NA | JS609_02990 |
| putative 6-phospho-beta-glucosidase | CCG51779.1 | NA | BAMY71_00249 | NA |
| | NP_391735.1 | NA | NA | JS609_03909 |
| | QDK91899.1 | BAMY06_00233 | NA | NA |
| putative esterase YxiM | AOY05484.1 | NA | NA | JS609_03964 |
| putative glycosyltransferase | QCV96123.1 | BAMY06_02752 | BAMY71_02600 | NA |
| | QCV96123.1 | NA | NA | JS609_01367 |
| putative glycosyltransferase YkoT | ASB41833.1 | NA | NA | JS609_01421 |
| putative oligo-1,6-glucosidase 2 | AJK64068.1 | NA | BAMY71_03680 | NA |
| | QAW02849.1 | NA | NA | JS609_00325 |
| | AMP32821.1 | BAMY06_03802 | NA | NA |
| | AHC40869.1 | BAMY06_03803 | NA | NA |
| putative protein YqbO | QAW41282.1 | NA | NA | JS609_01344 |
| putative rhamnogalacturonan acetylesterase YesY | ASZ60459.1 | NA | NA | JS609_00761 |
| Putative sporulation-specific glycosylase YdhD | AKF76978.1 | NA | BAMY71 02559 | NA |
| | CAB12390.2 | NA | NA | JS609_00616 |
| | NP_391282.1 | NA | NA | JS609_03425 |
| | QDK89600.1 | BAMY06_02712 | NA | NA |
| Rhamnogalacturonan acetylesterase RhgT | QFY87628.1 | NA | NA | JS609_00756 |
| Rhamnogalacturonan endolyase YesW | QAT44941.1 | NA | NA | JS609_00759 |
| Rhamnogalacturonan exolyase YesX | AIX06475.1 | NA | NA | JS609_00760 |
| Trehalose-6-phosphate hydrolase | AIW36656.1 | NA | BAMY71_03178 | NA |
| | NP_388662.1 | NA | NA | JS609_00827 |
| | AVX18210.1 | BAMY06_03273 | NA | NA |
| UDP-N-acetylglucosamine--N-acetylmuramyl- | AMR47346.1 | NA | NA | JS609_01610 |
| (pentapeptide) pyrophosphoryl-undecaprenol N- | QDK89788.1 | BAMY06_02513 | BAMY71_02353 | NA |
| acetylglucosamine transferase | | | | |

TABLE 45
Putative antimicrobial resistance genes identified through genome analysis (percent identity >80 and percent coverage >95)

| | | | | | Accession | |
|---|---|---|---|---|---|---|
| Bacillus strain | Gene product | Gene id | % Coverage | % Identity | number | Antibiotic Resistance |
| B. | streptothricin N-acetyltransferase | satA_Bs | 100 | 85.63 | NG_064662.1 | STREPTOTHRICIN |
| amyloliquefaciens | SatA | | | | | |
| BAMY006 | tetracycline efflux MFS transporter | tet(L) | 100 | 86.64 | NG_048204.1 | TETRACYCLINE |
| | Tet(L) | | | | | |
| | rifamycin-inactivating | rphC | 99.35 | 80.41 | NG_063825.1 | RIFAMYCIN |
| | phosphotransferase RphC | | | | | |
| | 23S rRNA (adenine(2503)-C(8))- | clbA | 100 | 96.86 | NG_062350.1 | LINCOSAMIDE; MACROLIDE; |
| | methyltransferase ClbA | | | | | STREPTOGRAMIN |
| B. | streptothricin N-acetyltransferase | satA_Bs | 100 | 84.1 | NG_064662.1 | STREPTOTHRICIN |
| amyloliquefaciens | SatA | | | | | |
| BAMY071 | tetracycline efflux MFS transporter | tet(L) | 100 | 86.78 | NG_048204.1 | TETRACYCLINE |
| | Tet(L) | | | | | |
| | tetracycline efflux MFS transporter | rphC | 99.35 | 80.52 | NG_063825.1 | RIFAMYCIN |
| | Tet(L) | | | | | |
| | 23S rRNA (adenine(2503)-C(8))- | clbA | 100 | 99.14 | NG_062350.1 | LINCOSAMIDE; MACROLIDE; |
| | methyltransferase ClbA | | | | | STREPTOGRAMIN |
| B. subtilis | macrolide 2′-phosphotransferase | mphK | 100 | 97.72 | NG_065846.1 | MACROLIDE |
| PTA-86 | MphK | | | | | |
| | ABC-F type ribosomal protection | vmlR | 100 | 98.66 | NG_063831.1 | LINCOSAMIDE; STREPTOGRAMIN; |
| | protein VmlR | | | | | TIAMULIN |
| | rifamycin-inactivating | rphC | 99.39 | 82.18 | NG_063825.1 | RIFAMYCIN |
| | phosphotransferase RphC | | | | | |
| | aminoglycoside 6- | aadK | 99.77 | 98.12 | NG_047379.1 | STREPTOMYCIN |
| | adenylyltransferase AadK | | | | | |
| | streptothricin N-acetyltransferase | satA Bs | 100 | 95.78 | NG_064662.1 | STREPTOTHRICIN |
| | SatA | | | | | |
| | tetracycline efflux MFS transporter | tet(L) | 100 | 100 | NG_048204.1 | TETRACYCLINE |
| | Tet(L) | | | | | |

[0482] The 16S rRNA sequences of each of the ELA191006 and ELA2002071 bacteria strains are provided below:

ELA191006 16S rRNA sequence (BVEN6_C18)
(SEQ ID NO: 259)
TCGGAGAGTTTGATCCTGGCTCAGGACGAACGCTGGCGGCGTGCCTAAT
ACATGCAAGTCGAGCGGACAGATGGGAGCTTGCTCCCTGATGTTAGCGG
CGGACGGGTGAGTAACACGTGGGTAACCTGCCTGTAAGACTGGGATAAC
TCCGGGAAACCGGGGCTAATACCGGATGGTTGTCTGAACCGCATGGTTC
AGACATAAAAGGTGGCTTCGGCTACCACTTACAGATGGACCCGCGGCGC
ATTAGCTAGTTGGTGAGGTAACGGCTCACCAAGGCGACGATGCGTAGCC
GACCTGAGAGGGTGATCGGCCACACTGGGACTGAGACACGGCCCAGACT
CCTACGGGAGGCAGCAGTAGGGAATCTTCCGCAATGGACGAAAGTCTGA
CGGAGCAACGCCGCGTGAGTGATGAAGGTTTTCGGATCGTAAAGCTCTG
TTGTTAGGGAAGAACAAGTGCCGTTCAAATAGGGCGGCACCTTGACGGT
ACCTAACCAGAAAGCCACGGCTAACTACGTGCCAGCAGCCGCGGTAATA
CGTAGGTGGCAAGCGTTGTCCGGAATTATTGGGCGTAAAGGGCTCGCAG
GCGGTTTCTTAAGTCTGATGTGAAAGCCCCCGGCTCAACCGGGGAGGGT
CATTGGAAACTGGGGAACTTGAGTGCAGAAGAGGAGAGTGGAATTCCAC
GTGTAGCGGTGAAATGCGTAGAGATGTGGAGGAACACCAGTGGCGAAGG
CGACTCTCTGGTCTGTAACTGACGCTGAGGAGCGAAAGCGTGGGGAGCG
AACAGGATTAGATACCCTGGTAGTCCACGCCGTAAACGATGAGTGCTAA
GTGTTAGGGGGTTTCCGCCCCTTAGTGCTGCAGCTAACGCATTAAGCAC
TCCGCCTGGGGAGTACGGTCGCAAGACTGAAACTCAAAGGAATTGACGG
GGGCCCGCACAAGCGGTGGAGCATGTGGTTTAATTCGAAGCAACGCGAA
GAACCTTACCAGGTCTTGACATCCTCTGACAATCCTAGAGATAGGACGT
CCCCTTCGGGGGCAGAGTGACAGGTGGTGCATGGTTGTCGTCAGCTCGT
GTCGTGAGATGTTGGGTTAAGTCCCGCAACGAGCGCAACCCTTGATCTT
AGTTGCCAGCATTCAGTTGGGCACTCTAAGGTGACTGCCGGTGACAAAC
CGGAGGAAGGTGGGGATGACGTCAAATCATCATGCCCCTTATGACCTGG
GCTACACACGTGCTACAATGGACAGAACAAAGGGCAGCGAAACCGCGAG
GTTAAGCCAATCCCACAAATCTGTTCTCAGTTCGGATCGCAGTCTGCAA
CTCGACTGCGTGAAGCTGGAATCGCTAGTAATCGCGGATCAGCATGCCG
CGGTGAATACGTTCCCGGGCCTTGTACACACCGCCCGTCACACCACGAG
AGTTTGTAACACCCGAAGTCGGTGAGGTAACCT
B. ayloliquefaciens ELA2002071 16S-rRNA
(BVEN2071_C21)
(SEQ ID NO: 260)
GGAGAGTTTGATCCTGGCTCAGGACGAACGCTGGCGGCGTGCCTAATAC
ATGCAAGTCGAGCGGACAGATGGGAGCTTGCTCCCTGATGTTAGCGGCG
GACGGGTGAGTAACACGTGGGTAACCTGCCTGTAAGACTGGGATAACTC
CGGGAAACCGGGGCTAATACCGGATGGTTGTCTGAACCGCATGGTTCAG
ACATAAAAGGTGGCTTCGGCTACCACTTACAGATGGACCCGCGGCGCAT
TAGCTAGTTGGTGAGGTAACGGCTCACCAAGGCGACGATGCGTAGCCGA
CCTGAGAGGGTGATCGGCCACACTGGGACTGAGACACGGCCCAGACTCC
TACGGGAGGCAGCAGTAGGGAATCTTCCGCAATGGACGAAAGTCTGACG
GAGCAACGCCGCGTGAGTGATGAAGGTTTTCGGATCGTAAAGCTCTGTT
TTGTTAGGGAAGAACAAGTGCCGTTCAAATAGGGCGGCACCTTGACGGT
ACCTAACCAGAAAGCCACGGCTAACTACGTGCCAGCAGCCGCGGTAATA
CGTAGGTGGCAAGCGTTGTCCGGAATTATTGGGCGTAAAGGGCTCGCAG
GCGGTTTCTTAAGTCTGATGTGAAAGCCCCCGGCTCAACCGGGGAGGGT
CATTGGAAACTGGGGAACTTGAGTGCAGAAGAGGAGAGTGGAATTCCAC
GTGTAGCGGTGAAATGCGTAGAGATGTGGAGGAACACCAGTGGCGAAGG
CGACTCTCTGGTCTGTAACTGACGCTGAGGAGCGAAAGCGTGGGGAGCG
AACAGGATTAGATACCCTGGTAGTCCACGCCGTAAACGATGAGTGCTAA
GTGTTAGGGGGTTTCCGCCCCTTAGTGCTGCAGCTAACGCATTAAGCAC
TCCGCCTGGGGAGTACGGTCGCAAGACTGAAACTCAAAGGAATTGACGG
GGGCCCGCACAAGCGGTGGAGCATGTGGTTTAATTCGAAGCAACGCGAA
GAACCTTACCAGGTCTTGACATCCTCTGACAATCCTAGAGATAGGACGT
CCCCTTCGGGGGCAGAGTGACAGGTGGTGCATGGTTGTCGTCAGCTCGT
GTCGTGAGATGTTGGGTTAAGTCCCGCAACGAGCGCAACCCTTGATCTT
AGTTGCCAGCATTCAGTTGGGCACTCTAAGGTGACTGCCGGTGACAAAC
CGGAGGAAGGTGGGGATGACGTCAAATCATCATGCCCCTTATGACCTGG
GCTACACACGTGCTACAATGGACAGAACAAAGGGCAGCGAAACCGCGAG
GTTAAGCCAATCCCACAAATCTGTTCTCAGTTCGGATCGCAGTCTGCAA
CTCGACTGCGTGAAGCTGGAATCGCTAGTAATCGCGGATCAGCATGCCG
CGGTGAATACGTTCCCGGGCCTTGTACACACCGCCCGTCACACCACGAG
AGTTTGTAACACCCGAAGTCGGTGAGGTAACCTTTTAGGAGCCAGCCGC
CGAAGGTGGGACAGATGATTGGGGTGAAGTCGTAACAAGGTAGCCGTAT
CGGAAGGTGCGGCTGGATCACCTCCTTT

### Example 18

### Safety and Muli-omics Characterization of Host-Derived Bacillus spp. Probiotics for Improved Growth Performance in Poultry

[0483] Microbial feed ingredients or probiotics have been used widely in the poultry industry to improve production efficiency. Spore-forming Bacillus spp. offer advantages over traditional probiotic strains as Bacillus spores are resilient to high temperature, acidic pH, and desiccation. This results in increased strain viability during manufacturing and feed-pelleting processes, extended product shelf-life, and increased stability within the animal's gastrointestinal tract. Despite numerous reports on the use of Bacillus spores as feed additives, detailed characterizations of Bacillus probiotic strains are typically not published. Insufficient characterizations can lead to misidentification of probiotic strains in product labels, and the potential application of strains carrying virulence factors, toxins, antibiotic resistance, or toxic metabolites. Hence, it is critical to characterize in detail the genomic and phenotypic properties of these strains to screen out undesirable properties and to tie individual traits to clinical outcomes and possible mechanisms. Here, we report a screening workflow and comprehensive multi-omics characterization of Bacillus spp. for use in broiler chickens. Host-derived Bacillus strains were isolated and screened for desirable probiotic properties. The phenotypic, genomic and metabolomic analyses of three probiotic candidates, two B. amyloliquefaciens (Ba ATCC PTA126784 (ELA191024, strain 24) and ATCC PTA126785 (ELA191036, strain 36)), and a B. subtilis (Bs ATCC PTA126786 (ELA191105, strain 105)), showed that all three strains had promising probiotic traits and safety profiles. Inclusion of Ba ATCC PTA12684 (Ba-PTA84 (ELA191024, strain 24)) in the feed of broiler chickens resulted in improved growth performance, as shown by a significantly improved feed conversion ratio (3.3%), increased of European Broiler Index (6.2%), and increased average daily gain (3.5%). Comparison of the cecal microbiomes from Ba PTA84-treated and control animals suggested minimal differences in microbiome structure, indicating that the observed growth promotion presumably was not mediated by modulation of cecal microbiome.

[0484] Introduction

[0485] An increasing demand for poultry meat and egg has put significant pressure on the poultry industry to improve production efficiency. The Food and Agriculture Organization of the United Nations (FAO) projected that global meat and egg consumption will increase by 52 and 39%, respectively, in 2050 compared to 2012 (1). The challenge is further heightened by restrictions from European Union and United States regulatory bodies on the use of antibiotics as growth promoters (AGPs) and prophylactic care; this change is due to public health concerns related to the development and spread of antibiotic resistant bacteria (2, 3). Antibiotics have been used as AGPs for over half a century, aiding growth performance and controlling disease outbreaks (4).

[0486] For the above reasons, microbial feed ingredients, also called direct-fed microorganisms (DFMs) or probiotics, have attracted tremendous interest as an alternative to AGPs to support improved production efficiency. Probiotics are defined as “live microorganisms that, when administered in adequate amounts, confer a health benefit on the host” (5). Probiotics are believed to exert their benefits through the following proposed mechanisms: assisting with nutrition and digestion, competitive exclusion of pathogens, modulating the immune system and gut microbiota, improving epithelial integrity, and/or producing small molecule metabolites that are beneficial to the host (6, 7). In addition to the above probiotic effects, microorganisms used as probiotics must survive environmental and processing challenges prior to reaching their target site. This includes low acidity of the upper gastrointestinal tract (GIT), bile acid toxicity, and heat exposure during feed pelleting application, which could pose challenges to the use of traditional probiotic strains such as those belonging to the genera Lactobacillus and Bifidobacterium, as they are often sensitive to some of these extreme conditions.

[0487] Endospore-forming Bacillus spp. offer advantages over traditional probiotic strains due to the ability of Bacillus spores to withstand hostile environments such as high temperature, desiccation, and acidic pH, resulting in increased viability during the manufacturing and feed-pelleting process, increased stability inside animals' GIT and extended product shelf-life. Thus, Bacillus strains have been widely used to support improved production parameters (8-11). Bacillus spp., commonly found in soil, enter the animal GIT through feed or ingestion of fecal material. Once inside the GIT, the spores germinate into metabolically active vegetative cells, eliciting their probiotic effect (12-15). Within the Bacillus genus, species commonly used as probiotics are B. subtilis, B. coagulans, B. clausii, B. amyloliquefaciens, and B. licheniformis (16). Bacillus strains are known to produce commercial enzymes, antimicrobial peptides, and small metabolites that may confer health benefits to the host by supporting improved feed digestion, suppressing undesirable organisms, and by maintaining a healthy gut microbiota and immune system (reviewed in (17)).

[0488] Despite several reports on the benefits of Bacillus spores as probiotics and DFMs on human and animal health, respectively, detailed characterizations of Bacillus spp. strains to not only help explain their potential probiotic properties but also to evaluate their safety are typically unavailable in the public domain Insufficient characterization of probiotic strains could result in the following undesirable outcomes: 1) misleading identification at the genus and species levels of probiotic strains in commercial products; and 2) the occurrence of antimicrobial resistance traits and toxins in probiotic strains that could negatively impact the host and raise public health concerns. As an example of the first instance, commercial probiotics labeled as B. coagulans were later shown to be Lactobacillus sporogenes, and B. clausii-containing probiotics were mislabeled as comprised of B. subtilis (19-21).

[0489] To fill the knowledge gap in the genomic and phenotypic characterization of Bacillus spp. DFMs, we take advantage of DNA sequencing and omics technologies for the comprehensive identification, screening, and characterization of Bacillus spp. to assess their safety and efficacy as probiotic candidates. Detailed strain characterizations employing multi-omics approaches could uncover correlations between strain properties and the effects of probiotic administration on the host, underpin possible mechanisms of action of probiotic strains, identify biomolecules that could be used in place of live bacteria (i.e. peptides, enzymes, metabolites), and help to rationally design strain consortia to maximize positive effects on the host.

[0490] Here, we present a comprehensive screening and multi-omics characterization for Bacillus spp. as probiotics for use in poultry. Our analysis provides insights into the genotypic, phenotypic, and metabolomic properties of three Bacillus spp. strains that show desirable probiotic traits and safety profiles. Furthermore, results from a clinical study of the administration of one of the strains—B. amyloliquefaciens Ba PTA84—showed a significant improvement of broiler growth performance. Such in-depth characterization and the data made available will guide future efforts to develop next generation probiotics, microbial-derived nutritional health products, and inform decisions to design microbial consortia for the potential improvement of poultry production efficiency.

[0491] Materials and Methods

[0492] Microbial strains and growth conditions—The Bacillus spp. strains were routinely grown in Lysogeny Broth (LB) and incubated at 37° C. overnight while shaking at 200 rpm. Avian pathogenic Escherichia coli (APEC) serotypes O2, O18, O78 and Clostridium perfringens NAH 1314-JP1011 were obtained from the Elanco pathogen library. Salmonella enteritica serovar Typhimurium ATCC 14028 was purchased from the American Type Culture Collection (ATCC, Manassas, VA). E. coli strains and S. Typhimurium, were routinely grown in LB, and C. perfringens was grown in anaerobic Brain Heart Infusion (BHI) broth supplemented with yeast extract (5.0 g/L) and L-cysteine (0.5 g/L). For growth in liquid culture, a colony from the respective agar plate was inoculated into a 10 mL tube containing liquid media and the tube was incubated in a shaker incubator at 37° C. and 200 rpm for E. coli and S. Typhimurium, and statically at 39° C. for C. perfringens inside a Bactron anaerobic chamber (Sheldon Manufacturing, Inc., Cornellius, OR). The anaerobic chamber contained a mixture of N2:CO2:H2 (87.5:10:2.5, v/v/v).

[0493] Vero cells growth condition—Vero cells were obtained from Elanco cell culture collection and were maintained in Opti-MEM® I reduced serum media containing 5% Fetal Bovine Serum (FBS) (Cytiva, Marlborough, MA) and Gentamicin (Opti-5-Gent) (Life Technologies, Carlsbad, CA). The serum-free cell culture medium was similarly prepared with Minimal Essential Medium with Earle's Balanced Salt Solution (MEM/EBSS), 10% fetal bovine serum (FBS), 1% non-essential amino acids and 1% L-glutamine in place of FBS. To generate wells containing 100% confluent cells for the cytotoxicity assay, Vero cells grown for two to three days were divided into a 96-well flat bottom tissue culture plate (Fisher Scientific, Waltham, MA) where each well contained 1×104 cells. The cells were then incubated on the plate for 48-72 hours inside a CO2 incubator (37° C.; % CO2 was maintained at 5±1%).

[0494] Bacillus Spp. Isolation and Identification

[0495] Bacillus isolation—Bacillus spp. were isolated from cecal contents of healthy 30-42 day old chickens raised at poultry research farms in Arkansas, Georgia, and Indiana, USA employing a combination of a high-throughput isolation platform employing Prospector® (GALT, Inc, San Carlos, CA) following the manufacture's protocol, and a classical isolation method as described previously (22). For both approaches, isolation protocols were preceded by selection of Bacillus spores from the starting cecal contents by applying heat at 95° C. for 5 min or treatment with ethanol. For the latter, frozen cecal samples from the Elanco library preserved in BHI containing 20% glycerol were thawed and equal amounts of Tryptic Soy Broth (TSB) medium were added and mixed. An equal amount of absolute ethanol was added to the sample to a final concentration of 50% and the mixture was incubated at 30° C. for an hour. The ethanol-treated samples were then used for isolation. For Bacillus spp. isolation employing conventional methods, 10-fold serial-dilution was applied to the treated cecal samples to ensure separate colonies recovered on agar plates. Each colony was purified by three sequential passages onto agar plates.

[0496] Strain identification—For an initial strain identification, Bacillus cell lysates were sent to the TACGen genomic sequencing facility (Richmond, CA) for strain identification. The strain identities were determined by Sanger sequencing of amplified regions of a partial length of 16S ribosomal RNA (rRNA) gene employing primers 27F (5′ AGA GTT TGA TCM TGG CTC AG 3′) and 1492R (5′ CGG TTA CCT TGT TAC GAC TT3′). The resulting 16S rRNA sequences were then searched against the NCBI 16S rRNA database using BLAST searches with an e-value cutoff of <10-20 and a percent sequence identity value of >95%. Strain identification of select isolates were further confirmed by ortholog analyses as described in the following section: Genome-based strain identification and comparative genomic analyses.

[0497] In vitro microorganism inhibition assay—Eight Bacillus spp. strains were screened for their antimicrobial activity against five microorganisms, namely APEC serotypes O2, O18, O78, Salmonella Typhimurium ATCC 14028, and Clostridium perfringens NAH 1314-JP1011. The assays were modified from a protocol described in (23) and performed in duplicate. The detailed protocol is presented in Supplementary Materials.

[0498] Enzyme activities—The β-mannanase assay was adapted from a protocol as described by Cleary, B., et. al. (24). Assays for amylase and protease activities were done following protocols in (23). These protocols are presented in Supplementary Materials.

[0499] Cytotoxicity assay—Cytotoxicity assays of eight Bacillus culture supernatants were performed following the protocol described in EFSA guidelines (25). A detailed protocol is described in Supplementary Information. Culture supernatant of B. cereus ATCC 14579 and B. licheniformis ATCC14580 were used as positive and negative controls, respectively.

[0500] Antimicrobial susceptibility assessment—Antibiotic susceptibility assays of Bacillus spp. for tetracycline, chloramphenicol, streptomycin, kanamycin, erythromycin, vancomycin, gentamycin, ampicillin, and clindamycin were performed and assessed according to an EFSA guideline for Antimicrobial resistance of the Bacillus spp. as direct fed microbials (25). Bacillus spp. strains on LB agar plates were sent to Microbial Research, Inc. (Fort Collins, CO) for analysis following protocols in compliance with Clinical Laboratory Standard Institute (CLSI) document VET01 (26). Briefly, MIC plates were prepared using cation-adjusted Mueller Hinton Broth (MHB) and the antimicrobials were 2-fold serially diluted to obtain a final concentration range of 0.06-32 μg/mL. Growth of Bacillus spp. in the presence of each of nine antimicrobials with different dilutions was monitored. Susceptibility was interpreted as the lack of Bacillus spp. growth in the presence of antimicrobial at a concentration that was lower that the cut-off values of the respective antimicrobials described in the EFSA guideline (FIG. 2A). For quality control, the following organisms were used as controls, Escherichia coli ATCC 25922, Enterococcus faecalis ATCC 29212, Pseudomonas aeruginosa ATCC 27853 and Staphylococcus aureus ATCC 29213.

[0501] Whole Genome Sequencing, Assembly and Annotation

[0502] Genomic DNA isolation—High molecular weight genomic DNA of Bacillus spp. were extracted employing a Phenol:Chloroform:Isoamyl alcohol (PCI) method as described previously (27). Bacterial cells were harvested by centrifugation at 7,000×g for 10 min from an overnight culture of Bacillus spp. grown in 25 mL LB supplemented with 0.005% Tween 80 in 50 mL sterile Falcon tube (Fisher Scientific, Waltham, MA). The resulting cell pellet was resuspended in 0.75 mL of 1×Tris-EDTA (TE) buffer (Life Technologies, Carlsbad, CA), pH 8, containing Tris-HCl and EDTA at final concentrations of 10 and 1 mM, respectively, in a 2 mL Eppendorf tube (Fisher Scientific, Waltham, MA). To lyse the cells, Lysozyme (Sigma Aldrich, St. Louis, MO) was added at a final concentration of 7 mg/mL and the mixture was incubated at 37° C. for an hour. Then, SDS and Proteinase K (Sigma Aldrich, St. Louis, MO) were added to the mixture at final concentrations of 2% and 400 ug/mL, respectively, and the lysate was incubated at 60° C. for 1 hour. To remove RNA from the cell lysate, 10 jut of RNase (ThermoFisher Scientific, Waltham, MA) were added and the mixture was incubated at 37° C. for 30 min. An equal volume of a mixture of PCI (25:24:1, v/v/v) was added to the supernatant and was mixed by carefully inverting tubes 5-10 times rigorously. The aqueous phase containing DNA was separated from the organic phase by centrifugation at 12,000×g for 15 min, and the top aqueous layer was collected into a fresh 2 mL Eppendorf tube. An equal volume of a mixture of Chloroform:Isoamyl alcohol (24:1, v/v) was added to this aqueous phase containing DNA, and mixed by carefully inverting the tube. The mixture was centrifuged at 12,000×g for 10 min. DNA from the aqueous layer was precipitated by an addition of one tenth volume of sodium acetate (3M, pH 5.2) followed by centrifugation at 16,000×g for 20 min. The DNA pellet was washed three times with ice-cold 70% ethanol, air-dried, and resuspended in 0.5 mL 1×TE buffer.

[0503] PacBio long read genome sequencing—The bacterial genomic DNA samples were shipped on dry-ice to DNA Link, Inc. (San Diego, CA) for whole genome sequencing using PacBio RSII platform. Briefly, 20 kb DNA fragments were generated by shearing genomic DNA using the covaris G-tube according to the manufacturer's recommended protocol (Covaris, Woburn, MA). Smaller fragments were purified by the AMpureXP bead purification system (Beckman Coulter, Brea, CA). For library preparation, 5 μg of genomic DNA were used. The SMRTbell library was constructed using SMRTbell™ Template Prep Kit 1.0 (PacBio®, Menlo Park, CA) Small fragments were removed using the BluePippin Size selection system (Sage Science, Beverly, MA). The remaining DNA sample was used for large-insert library preparation. A sequencing primer was annealed to the SMRTbell template and DNA polymerase was bound to the complex using DNA/Polymerase Binding kit P6 (PacBio®, Menlo Park, CA). Following the polymerase binding reaction, the MagBead was bound to the library complex with MagBeads Kit (PacBio®, Menlo Park, CA). This polymerase-SMRTbell-adaptor complex was loaded into zero-mode waveguides. The SMRTbell library was sequenced by 2 PacBio® SMRT cells (PacBio®, Menlo Park, CA) using the DNA sequencing kit 4.0 with C4 chemistry (PacBio®, Menlo Park, CA). A 1×240-minute movie was captured for each SMRT cell using the PacBio® RS sequencing platform.

[0504] Genome Assembly, Annotation and Features Prediction—The genome was assembled by DNA link, Inc. with HGAP.3. Genome annotation was carried out using a custom annotation pipeline by combining several prediction tools. Coding sequences, transfer RNA and transmembrane RNA were predicted and annotated using Prokka (28-30). Ribosomal binding site (RBS) prediction was carried out using RBSFinder (31). TranstermHP was used to predict Rho-independent transcription terminators (TTS) (32). Ribosomal RNA and other functional RNAs such as riboswitches and non-coding RNA was annotated with Infernal (33). Operons were predicted based on primary genome sequence information with Rockhopper v2.0.3 using default parameters (34). Insertion sequence prediction was done using ISEscan v.1.7.2.1 (40). Prophage prediction was done using PhiSpy v4.2.6 which combines similarity- and composition-based strategies (41).

[0505] Genome-based strain identification and comparative genomic analyses—Taxonomic labelling of the assembled microbial genomes was carried out using CAMITAX (35). CAMITAX is a scalable workflow that combines genome distance—, 16S ribosomal RNA gene—, and gene homology-based taxonomic assignments with phylogenetic placement. OrthoFinder v2.3.1 (36) was used to determine orthologous relationships (37).

[0506] Phylogenetic analysis—Phylogenetic relationships of the genomes were explored with UBCG v3.0 using default settings (38). This software tool employs a set of 92 single-copy core genes commonly present in all bacterial genomes. These genes then were aligned and concatenated within UBCG using default parameters. The estimation of robustness of the nodes is done through the gene support index (GSI), defined as the number of individual gene trees, out of the total genes used, that present the same node. A maximum-likelihood phylogenetic tree was inferred using FastTree v.2.1.10 with the GTR+CAT model (39).

[0507] Patent depository of Bacillus amyloliquefaciens ATCC PTA-126784 and PTA-126785, and B. subtilis ATCC PTA-126786 —Bacillus amyloliquefaciens ATCC PTA-126784 and PTA-126785, and B. subtilis ATCC PTA-126786 strains were deposited in the ATCC culture collection (Manassas, VA). For simplicity, Bacillus amyloliquefaciens ATCC PTA-126784 and PTA-126785, and B. subtilis ATCC PTA-126786 strains are referred to as Ba PTA84 and Ba PTA85, and Bs PTA86, respectively.

[0508] Global untargeted metabolomic analysis—Bacillus strains Bs PTA86, Ba PTA84, and Ba PTA85 were grown as three single strain cultures, and then were analyzed as a two-strain (Ba-PTA84 and PTA85) or three-strain (Bs-PTA86, Ba-PTA84, and Ba-PTA85) consortia in 5 mL of minimal or rich liquid media. For growth in minimal media, medium containing 1×M9 salts, and glucose at a final concentration of 0.5% (w/v) was used. Rich medium contained the following entities (g/L): peptone 30; sucrose 30; yeast extract 8; KH2PO4 4; MgSO4 1; and MnSO4 0.025. The culture was grown at 37° C. overnight. Bacillus cells were pelleted by centrifugation at 10,000×g for 10 min, cell pellets were washed three times with ice-cold PBS. The resulting cell pellets and cell-free supernatants were stored at −80 C and sent to metabolon Inc. (Durham, NC) for global untargeted metabolomic profiling. Detailed description of metabolomic analysis is presented in Supplementary Methods.

[0509] In-Vivo Assessment of Bacillus DFM for Improvement of Growth Performance in Broiler Chickens

[0510] Spore generation—Bacillus spores were generated employing a modified protocol as described in (42). Bacillus spp. was grown in a liquid Difco sporulation medium containing Nutrient Broth (BD Difco, Franklin Lakes, NJ, USA), 8.0 g/L; KCl, 1 g/L, and MgSO4.7H2O, 0.12 g/L. The mixture was adjusted to pH 7.6 with additions of NaOH. After adjusting the pH and sterilizing the media by the use of an autoclave at 121° C., 1 mL of each of the following mineral sterile stock solutions were added to broth media, 1.0 M CaCl2, 0.01 M MnSO4, 1.0 mM FeSO4. A sterile glucose solution was also added to the medium mixture to a final concentration of 5.0 g/L. A single colony was taken from an agar plate and was inoculated into 100 mL of the sporulation medium. The culture was incubated overnight at 37° C. with shaking at 200 rpm. This culture served as a seeding culture for 1 L of liquid culture. All growth were done employing vented baffled flasks. This culture was incubated at 37° C. while shaking at 200 rpm for at least 72 hours. The presence of spores was monitored with a brightfield microscope. The spores were harvested at 17,000 rpm and washed three times with pre-chilled sterile distilled water. The spores were then resuspended in 30 mL of pre-chilled sterile distilled water and the spore suspension was mixed with irradiated ground rice hulls (Rice Hull Specialty Products, Stuttgart, AR), dried at 60° C. for 3-4 hours to eliminate vegetative cells. To determine spore inclusion in the rice hulls, 0.25 g of the material containing spores was heat treated at 90° C. for 5 min. One milliliter of water was added to the material and allowed to soak for 15-30 min. The suspension was vortexed for 30 sec and serially diluted 10-fold for colony counts on agar plates.

[0511] Study Design

[0512] A total of 2,500 one-day-old male broiler chicks (Cobb 500) were randomly allocated to two treatment groups on Study Day (SD) 0. The control group received only the basal diet, while the treated group received the basal diet plus 1.5×105 CFU of Ba PTA84 per gram of final feed. The control group consisted of 30 pens of 50 birds per pen, and the Ba PTA84 group consisted of 20 pens of 50 birds per pen.

[0513] Birds were housed in floor pens in a single environmentally controlled room with ad libitum access to treatment diets and water. Basal diets were formulated to be iso-nutritive, and to meet or exceed the nutrient requirements recommended for broilers (Table S9). Feed was issued in four study phases: Starter Phase I (SD 0-12); Grower Phase II (SD 12-26); Finisher Phase III (SD 26-35), Withdrawal Phase IV (SD 35-42). Diets did not contain antibiotics, anticoccidials or growth promoters and were fed to the birds as a mash in all phases.

[0514] Bird weights (pen weight) were measured and recorded at SD 0, 12, 26, 35 and 42. Feed issued and weighed back were recorded for each feeding phase. Bird general health, mortality and environmental temperature were recorded daily.

[0515] Statistical Analysis

[0516] The experimental unit was the pen. All statistical analysis was conducted using the SAS® system version 9.4 (SAS Institute, Cary, NC),) and all tests were performed comparing the control group to the treated group using a one-sided test at P<0.05 level of significance.

[0517] Performance variables of interest for each feeding period and overall included: live final body weight (LFBW), average daily gain (ADG), average daily feed intake (ADFI), gain to feed efficiency (GF), feed to gain efficiency (FCR), mortality, and the European Broiler Index (EBI). These variables were calculated and evaluated for each study phase (Starter, Grower, Finisher, Withdrawal and Overall (SD 0-42)) and both adjusted for mortality and unadjusted.

[0518] Microbiome Profiling of Cecal Content from Birds Treated with Ba PTA84

[0519] DNA Extraction, Library Preparation and Sequencing—Total DNA from cecal content samples were extracted employing the Lysis and Purity kit (Shoreline Biome, Farmington, CT) following manufacturer's protocol. The resulting DNA was used as template for library preparation using Shoreline Biome's V4 16S DNA Purification and Library Prep Kit (Shoreline Biome, Farmington, CT). Briefly, PCR amplification of the V4 region of the 16S rRNA gene was performed using the extracted DNA and the primers 515F (5′GTGGCCAGCMGCCGCGGTAA) and 806R (5′-GGACTACHVHHHTWTCTAAT). The resulting amplicons were then sequenced using 2×150 bp paired-end kits on the Illumina iSeq platform. To increase diversity, PhiX 50 pM was added to a final concentration of 5% into the amplicon library.

[0520] Bioinformatic analysis—Forward and reverse reads were processed with cutadapt (v 2.5) (43) to remove primer sequences. Read pairs without primer sequences present or more than 15% primer mismatches were discarded. The DADA2 pipeline (v. 1.12.1) (44) was used to generate a count matrix of amplicon sequence variants (ASVs) across samples. Due to the short length of iSeq reads, forward and reverse reads were trimmed to a length of 110 bp and merged with DADA2's justConcatenate option. The DADA2 parameters parameters maxN=0, truncQ=2, rm.phix=TRUE and maxEE=2 were used. Taxonomic labels were assigned to each ASV using the DADA2 assignTaxonomy method and the Silva v. 138 database (45). Diversity and richness per sample were quantified from the ASV matrix using the Simpson, Shannon and Chao indices (46-48) and compared across treatments with the Mann-Whitney U test. Comparison of microbiome structures across treatments was performed using PERMANOVA and ANOSIM analysis based on the Bray-Curtis dissimilarity between samples. PERMANOVA and ANOSIM were performed using code in the scikit-bio python package (49). Principal component analysis of the Bray-Curtis dissimilarity matrix was used to analyze sample clustering according to treatment group.

[0521] Supplementary Methods

[0522] In vitro microbial inhibition assay—The assays were modified from a protocol described in (113) and performed in duplicate. Briefly, 10 μl of Bacillus freezer stock was inoculated into 2 mL of 0.5×LB in a 15 mL round bottom shaker tube. The cultures were incubated at 37° C. for 48 hours while shaking at 200 rpm. For APEC strains and S. Typhimurium, 50 μl of freezer stock was inoculated into 5 mL of LB in a 15 mL round bottom shaker tube. The cultures were incubated at 37° C. overnight while shaking at 200 rpm. Once pathogens had grown overnight in liquid culture, 1.0×105 cfu/ml of the overnight culture were inoculated into freshly prepared LB soft agar (0.8% w/v) that was cooled in a water bath set to 45° C. after autoclave sterilization. 5 mL of the molten agar was aliquoted into each well of a 6-well cell culture plate (2 wells per Bacillus strain plus the negative control). The soft agar was solidified and air-dried for 3-4 hours. Onto this agar, 5 μl of 48-hour Bacillus culture were applied to the center of each well. The plates were inverted and allowed to incubate overnight at 37° C. for 24 hours and zones of inhibition were observed and recorded.

[0523] For Clostridium perfringens screening, 5 mL of molten LB agar (1.5%, w/v) were aliquoted into each well of a 6-well cell culture plate and allowed to solidify overnight. Then 5 μl of 48-hour Bacillus culture were spotted onto the center of each well. The plates were inverted and allowed to incubate overnight aerobically at 37° C. A colony of Clostridium perfringens NAH 1314-JP1011 was inoculated in liquid BYC broth an incubated overnight at 39° C. in the anaerobic chamber. Freshly prepared BYC soft agar (0.8%, w/v) was autoclaved and allowed to cool in a water bath set to 45° C. Once cooled, the overnight C. perfringens culture was inoculated into molten soft agar at 1.0×105 cfu/ml and mixed on a stir plate. 5 mL of the molten agar was aliquoted on top of each well of the 6-well cell culture plates containing Bacillus spots. As a negative control, C. perfringens-containing molten agar was poured onto LB agar without Bacillus. Once solidified, plates were inverted and allowed to incubate anaerobically overnight at 39° C. for 24 hours. Then, zones of inhibition were observed and recorded.

[0524] Enzyme activities—β-mannanase assay was adapted from a protocol as described by Cleary, B., et. al. (114). Assays for amylase and protease followed protocols in (113). For testing β-mannanase activity, Bacillus strains were grown in 5 milliliters of LB medium in a 15 mL culture tube overnight at 37° C. while shaking at 200 rpm. Then 5 μl of 24 hour Bacillus culture were spotted in duplicate onto the center of an LB agar plate containing 100 mM CaCl2. The agar plates were incubated overnight at 37° C. Fresh soft agar containing Azo-carob Galactomannan (0.5%, w/v), agar (0.7%, w/v), dissolved in 50 mM Tris-HCl pH 7.0 buffer was autoclaved and allowed to cool in a water bath set to 45° C. Once cooled, the soft agar substrate was overlayed on to agar plates containing Bacillus colonies until each colony was surrounded by substrate. The plates were incubated overnight at 37° C. and allowed to incubate for 48 hours. The zone of clearance due to β-mannanase activity could be directly visualized and recorded.

[0525] For the amylase assay, agar plates containing the following ingredients were used (entity, g/L): Tryptone, 10, Soluble starch, 3, KH2PO4, 5, Yeast extract, 10, Noble Agar, 15. An overnight culture of Bacillus isolates in 0.5×LB was used as an inoculum. The Bacillus culture was spotted onto the above plate containing soluble starch and the inoculated plates were incubated at 37° C. for 48 hours. The zone of clearance due to amylase activity was visualized by flooding the surface of the plates with 5 mL of Gram's iodine solution.

[0526] For testing protease activity, agar plates containing the following ingredients were used (entity, g/L): skim milk, 25, noble agar, 25. An overnight culture of Bacillus isolates in 0.5×LB was used as inoculum. The Bacillus culture was spotted onto the above plate containing soluble starch and the inoculated plates were incubated at 37° C. for 24 hours. The zone of clearance due to protease activity could be directly visualized.

[0527] Cytotoxicity Assay—Bacillus spp. strains were grown in 5 mL Brain Heart Infusion (BHI) liquid medium at 30° C. overnight. This overnight culture served as an inoculum for 5 mL fresh LB, the inoculated medium was then incubated at 30° C. for 6 hours without shaking. The expected cell density was at least 108 CFU/mL. The culture was then centrifuged at 1,700×g for 1 hour to generate cell-free culture supernatant.

[0528] 200 μL serum-free medium were added to the 100% confluent Vero cells grown on 96-well plates generated following the protocol described in Materials and Methods. The cells were then exposed to 100 jut of cell-free culture supernatant of Bacillus spp. and the mixture was incubated inside a CO2 incubator (5% v/v headspace of CO2, Thermo Scientific, Waltham, MA) at 37° C. for 3 hour. The corresponding cell-free culture supernatant was used in the control wells. B. cereus and B. licheniformis were used as positive and negative controls, respectively, and 0.1% Triton-X, 100 μL was used as a positive cytotoxicity control. The assay was performed in three technical replicates with three biological replicates.

[0529] At the end of the incubation period, culture supernatants were collected by centrifugation at 300×g for 5 min. Culture supernatants from technical replicate wells were combined. Four micro liters of the culture supernatant were used for a lactate dehydrogenase assay (Sigma Aldrich, St. Louis, MO) with a total volume of 100 μL, following the protocol as described in (115). The reaction was monitored at an absorbance of 450 nm at 37° C. for 10 minutes measuring the generation of NADH from NAD+ as products from lactate dehydrogenase reaction. The percent cytotoxicity level was calculated by the

$$\% Cytotoxicity = \frac{( A 460 nm sample - A 460 nm media control )}{( A 460 nm\_Triton X - A 460 nm\_media control )}$$

following formula.

[0530] The A450 nm value is an average of three biological replicates. A cytotoxicity percentage value higher than 20 was considered cytotoxic. The assays were repeated if cytotoxicity percentage of B. cereus, a positive control, was less than 40 or that of B. licheniformis, a negative control, was higher than 20.

[0531] Global untargeted metabolomic analysis—Metabolite analysis was performed at Metabolon, Inc. utilizing non-targeted UPLC-MS/MS approach employing a Waters ACQUITY ultra-performance liquid chromatography (Waters, Milford, MA) and a Q-Extractive high resolution/accurate mass spectrometer (Thermo Scientific, Waltham, MA) interfaced with a heated electrospray ionization (HESI-II) source and Orbitrap mass analyzer operated at 35,000 mass resolution. The samples were dried, reconstituted and aliquoted into four samples for the following analyses, a) Analysis of hydrophilic compounds employing acidic positive ion conditions with a C18 column (Waters UPLC BEH C18-2.1×100 mm, 1.7 μm) using water and methanol, containing 0.05% perfluoro pentanoic acid (PFPA) and 0.1% formic acid (FA), b) Analysis of more hydrophobic compounds employing a similar system as mentioned above except the mobile phase used was methanol, acetonitrile, water, 0.05% PFPA and 0.01% FA and was operated at an overall organic content. c) Analysis of basic negative ion employing a C18 column with methanol and water as mobile phase that contained 6.5 mM Ammonium Bicarbonate at pH 8. d) negative ionization following elution from a HILIC column (Waters UPLC BEH Amide 2.1×150 mm, 1.7 μm) using a gradient consisting of water and acetonitrile with 10 mM Ammonium Formate, pH 10.8. The MS analysis covered approximately 70-1000 m/z.

[0532] Metabolic compounds were identified by comparison to the Metabolon libraries of purified standards and recurrent unknown metabolites. The identification was based on retention index within a narrow RI window of the proposed identification, accurate mass match to the library+/−10 ppm, and the MS/MS forward and reverse scores.

[0533] Data from cell pellets and culture supernatants were analyzed separately. Raw intensity values were re-scaled for each identified metabolite by dividing them by the median intensity across samples. Missing values for a given metabolite and sample were imputed by assigning the minimum value for the metabolite across samples. The scaled and imputed data were Log 10 transformed for subsequent analyses. Principal component analysis (PCA) was used to analyze the similarity of metabolic profiles between samples. For supernatant samples, secreted metabolites were identified by comparing the scaled and imputed intensities to the respective metabolites in media controls. A 1.5-fold increase in scaled intensities over media was used to define metabolites secreted. A similar 1 5-fold increase between an individual strain and the remaining 2 strains, or between strain consortia and the corresponding individual strains, was used to define uniquely secreted metabolites.

[0534] Results

[0535] Isolation and Identification Bacillus Spp. from Healthy Animals

[0536] Bacillus spp. strains were isolated from the cecal contents and fecal materials of healthy chickens. The taxonomic identities of the isolates were determined by 16S-rRNA amplicon sequencing. These isolates belonged to 30 different Bacillus species with the top hits of B. velezensis, B. amyloliquefaciens, B. haynesii, B. pumilus, B. subtilis, and B. licheniformis.

[0537] Due to safety considerations, Bacillus spp. isolates chosen for further screening included only those that belong to the species listed as DFMs in the Association of American Feed Control Officials, Inc. (AAFCO) Official Publication since they “were reviewed by FDA Center for Veterinary Medicine and found to present no safety concerns when used in direct-fed microbial products” (50), and to the species listed as Qualified Presumption of Safety (QPS) status according to the European Food Safety Authority (EFSA) BIOHAZ Panel (3). These were B. subtilis, B. amyloliquefaciens, B. pumilus, and B. licheniformis.

[0538] In-Vitro Screening for Probiotic Properties of Bacillus Spp. Strains

[0539] Bacillus spp. strains were tested to determine their effect on selected microorganisms and their ability to secrete selected enzymes (23). For the former, Gram-negative and Gram-positive microorganisms (E. coli O2, O18, and O78, and Clostridium perfringens NAH 1314-JP1011) and Salmonella enterica serovar Typhimurium ATCC 14028, were used. For the latter, plate-based assays for determining the secretion of amylase, protease, and β-mannanase were performed.

[0540] A total of 266 Bacillus strains were first screened against E. coli O2, and 71% of the strains showing positive E. coli O2 inhibition were selected for a second-round of assays targeting E. coli O18, then E. coli O78, S. Typhimurium and lastly C. perfringens JP1011. The top 8 Bacillus strain candidates were selected according to their cumulative inhibition scores, and selected data is provided in TABLE 46. These included B. amyloliquefaciens (B a): Ba ELA006, Ba ELA071, Ba PTA84, Ba PTA85, and B. subtilis (Bs) isolate Bs PTA86.

TABLE 46
In Vitro Pathogen Inhibition and Digestive Enzyme
Activities of Selected Bacillus Spp.

| Pathogen inhibition | | | | | |
|---|---|---|---|---|---|
| and digestive enzyme | | Ba- | Ba- | | Bs- |
| activities | Ba-006 | PTA84 | PTA85 | Ba-071 | PTA86 |
| Pathogen inhibition^{a} | | | | | |
| Salmonella | 1 | 1 | 2 | 1 | 0 |
| Typhimurium ATCC | | | | | |
| 14028 | | | | | |
| Clostridium | 4 | 4 | 4 | 4 | 3 |
| perfringens JP1011 | | | | | |
| APEC O78 | 1 | 0 | 1 | 1 | 0 |
| APEC O2 | 1 | 1 | 1 | 1 | 1 |
| APEC O18 | 1 | 1 | 2 | 1 | 1 |
| Cumulative pathogen | 8 | 7 | 10 | 8 | 5 |
| inhibition Score | | | | | |
| Digestive enzymes^{b} | | | | | |
| Amylase | 1.83 | 1.8 | 2.1 | 1.59 | 2.04 |
| Protease | 2.05 | 2.58 | 2.05 | 2 | 1.95 |
| Beta-mannanase | 2.2 | 1.49 | 1.95 | 1.14 | 2 |
| Cumulative REA | 6.08 | 5.87 | 6.1 | 4.73 | 5.99 |
| Score | | | | | |

^{a}Pathogen inhibiton scores were assigned based on the size of clearance zone as follows, 0, no inhibition; 1, 2, 3, 4, clearance zone values of 0-0.9, 1.0-1.9, 2.0-2.9, and 3.0-4.0 mm, respectively. A clearance zone value is defined as the distance from the outer part of Bacillus colony to the end of pathogen growth inhibition zone.
^{b}Relative digestive enzyme activities were measured in Relative Enzyme Activity values (REA) that were calculated as a ratio between a diameter of clearance zone from enzyme activity and the diameter of Bacillus colony.

[0541] The cumulative inhibition score was calculated as the sum of the inhibition score values of a Bacillus strain against the five microorganisms tested. The data showed that selected Ba strains had better cumulative microbial inhibition scores compared to the Bs strain. The average cumulative inhibition scores were 8.5 and 5.5 for Ba and Bs, respectively.

[0542] The Bacillus strain candidates were also evaluated for their ability to secrete enzymes. Bacillus strains are known to produce a variety of enzymes (51, 52). In vitro plate-based assays for protease, amylase, and β-mannanase activities showed that six Ba and two Bs showed comparable amylase, protease, and β-mannanase activities, Ba ELA071 and Ba PTA85 showed the lowest and highest cumulative REA values of 4.73 and of 6.1, respectively.

[0543] Safety Assessment of Bacillus Spp. Probiotic Candidates

[0544] To evaluate the safety of Bacillus spp. as microbial feed ingredients, the Bacillus candidates were tested for antimicrobial susceptibility to medically relevant antimicrobials. Microbial feed ingredients should not carry or be capable of transferring antimicrobial resistance genes to other gut microbes. This is especially important in the case of medically relevant antimicrobials that are used in humans, given the rise of multidrug resistant bacteria.

[0545] The results from antimicrobial susceptibility tests for 8 Bacillus strains showed that all strains were susceptible to the tested antibiotics. The only exception was Bs ELA082 which exhibited a borderline resistance to streptomycin. The minimum inhibitory concentration of streptomycin for this strain was 16 μg/mL, which is 2-fold higher than the EFSA threshold cut-off of streptomycin for Bacillus as DFM, FIG. 43A.

[0546] To determine the potential toxicity of Bacillus strains on the host cells, culture supernatants of Bacillus spp. were tested for cytotoxicity toward Vero cells according to (25). The cytotoxicity assay was performed by monitoring the lactate dehydrogenase (LDH) enzyme originated from compromised Vero cells as described in (53). FIG. 43 B shows the cytotoxicity levels of each Bacillus strain tested. The results suggested that all 8 Bacillus strains were non-cytotoxic with toxicity levels far below 20%, a percentage that is considered cytotoxic according to the EFSA guidelines. Of all isolates, the cytotoxicity level of Ba PTA84 was closest to that of the negative control. In general, Ba strains exhibited toxicity levels that were lower than those of Bs strains. Within the B. subtilis group, the cytotoxicity level of Bs PTA86 was the lowest, 5%.

[0547] Selection of Bacillus Spp. as Direct Fed Microbial Candidates

[0548] Based on their performance on microorganism inhibition, enzymatic activities, antimicrobial susceptibility, and low toxicity against Vero cells, the strains Ba PTA84, Ba PTA85, and Bs PTA86 were chosen for more detailed characterization employing genomic and metabolomic approaches described in the following sections.

[0549] Untargeted Global Metabolomic Analysis of Cell Pellets and Culture Supernatants of Ba PTA84, Ba PTA85, and Bs PTA86 as Single Strains and as Consortia

[0550] Untargeted metabolomics analysis of cell pellets and culture supernatants of the three candidate strains was performed to assess differences in metabolite profiles. Cells were cultured in both rich and minimal media as individual strains, as well as a consortium of Ba PTA84 and Ba PTA85, and a consortium including all three strains. Named metabolites were identified in the supernatant and pellet samples, respectively (TABLE 47 and 48).

TABLE 47
Metabolites uniquely secreted by individual strains or strain consortia in rich media.
For individual strains, secreted metabolites with intensities >1.5 fold than remaining two strains on same
media. For strain consortia, secreted metabolites with intensitries >1.5 fold than corresponding individual
strains

| Super | | | Ba | Ba | Bs | Ba PTA84 + | Ba PTA84 + Ba |
|---|---|---|---|---|---|---|---|
| Pathway | Pathway | Metabolite | PTA84 | PTA85 | PTA86 | Ba PTA85 | PTA85 + Bs PTA86 |
| Amino Acid | Alanine and Aspartate | N,N-dimethylalanine | 0 | 0 | 0 | 0 | 1 |
| | Metabolism | | | | | | |
| Amino Acid | Glutamate Metabolism | N-acetylglutamine | 0 | 0 | 1 | 0 | 0 |
| Amino Acid | Glutathione Metabolism | glutathione, oxidized | 0 | 0 | 1 | 0 | 0 |
| | | (GSSG) | | | | | |
| Amino Acid | Glutathione Metabolism | 2-hydroxybutyrate/2- | 0 | 0 | 1 | 0 | 0 |
| | | hydroxyisobutyrate | | | | | |
| Amino Acid | Glycine, Serine and | N-acetylthreonine | 0 | 0 | 1 | 0 | 0 |
| | Threonine Metabolism | | | | | | |
| Amino Acid | Glycine, Serine and | N-acetylserine | 0 | 0 | 1 | 0 | 0 |
| | Threonine Metabolism | | | | | | |
| Amino Acid | Histidine Metabolism | N-acetylhistidine | 0 | 0 | 1 | 0 | 0 |
| Amino Acid | Histidine Metabolism | trans-urocanate | 0 | 0 | 1 | 0 | 0 |
| Amino Acid | Leucine, Isoleucine and | N-acetylvaline | 0 | 0 | 1 | 0 | 0 |
| | Valine Metabolism | | | | | | |
| Amino Acid | Leucine, Isoleucine and | isovalerate (C5) | 0 | 0 | 1 | 0 | 0 |
| | Valine Metabolism | | | | | | |
| Amino Acid | Leucine, Isoleucine and | N-acetylisoleucine | 0 | 0 | 1 | 0 | 0 |
| | Valine Metabolism | | | | | | |
| Amino Acid | Lysine Metabolism | N-acetyl-cadaverine | 0 | 0 | 1 | 0 | 0 |
| Amino Acid | Lysine Metabolism | N6-acetyllysine | 0 | 0 | 1 | 0 | 0 |
| Amino Acid | Lysine Metabolism | N6,N6-dimethyllysine | 0 | 0 | 0 | 1 | 0 |
| Amino Acid | Methionine, Cysteine, | S-methylcysteine | 0 | 0 | 1 | 1 | 0 |
| | SAM and Taurine | | | | | | |
| | Metabolism | | | | | | |
| Amino Acid | Methionine, Cysteine, | N-acetylmethionine | 0 | 0 | 1 | 0 | 0 |
| | SAM and Taurine | | | | | | |
| | Metabolism | | | | | | |
| Amino Acid | Methionine, Cysteine, | S-adenosylmethionine | 0 | 0 | 1 | 0 | 0 |
| | SAM and Taurine | (SAM) | | | | | |
| | Metabolism | | | | | | |
| Amino Acid | Methionine, Cysteine, | 2-hydroxy-4- | 0 | 0 | 1 | 0 | 0 |
| | SAM and Taurine | (methylthio)butanoic | | | | | |
| | Metabolism | acid | | | | | |
| Amino Acid | Phenylalanine Metabolism | N- | 0 | 0 | 1 | 0 | 0 |
| | | acetylphenylalanine | | | | | |
| Amino Acid | Phenylalanine Metabolism | phenyllactate (PLA) | 0 | 0 | 1 | 0 | 0 |
| Amino Acid | Polyamine Metabolism | acetylagmatine | 0 | 0 | 1 | 0 | 0 |
| Amino Acid | Tyrosine Metabolism | 3-(4- | 0 | 0 | 1 | 0 | 0 |
| | | hydroxyphenyl)lactate | | | | | |
| | | (HPLA) | | | | | |
| Amino Acid | Urea cycle; Arginine and | N-acetylcitrulline | 1 | 0 | 0 | 0 | 0 |
| | Proline Metabolism | | | | | | |
| Amino Acid | Urea cycle; Arginine and | N-acetylarginine | 0 | 0 | 1 | 0 | 0 |
| | Proline Metabolism | | | | | | |
| Carbohydrate | Aminosugar Metabolism | glucuronate | 0 | 0 | 1 | 0 | 0 |
| Carbohydrate | Glycolysis, | Isobar: hexose | 0 | 0 | 0 | 0 | 1 |
| | Gluconeogenesis, and | diphosphates | | | | | |
| | Pyruvate Metabolism | | | | | | |
| Cofactors | Nicotinate and | nicotinamide | 1 | 0 | 0 | 0 | 0 |
| and Vitamins | Nicotinamide Metabolism | ribonucleotide | | | | | |
| | | (NMN) | | | | | |
| Cofactors | Nicotinate and | nicotinamide riboside | 0 | 0 | 1 | 0 | 0 |
| and Vitamins | Nicotinamide Metabolism | | | | | | |
| Cofactors | Nicotinate and | NAD+ | 0 | 0 | 1 | 0 | 0 |
| and Vitamins | Nicotinamide Metabolism | | | | | | |
| Cofactors | Vitamin B6 Metabolism | pyridoxamine | 0 | 0 | 1 | 0 | 0 |
| and Vitamins | | phosphate | | | | | |
| Cofactors | Vitamin B6 Metabolism | pyridoxamine | 0 | 0 | 1 | 0 | 0 |
| and Vitamins | | | | | | | |
| Energy | TCA Cycle | succinate | 1 | 0 | 0 | 0 | 0 |
| Energy | TCA Cycle | alpha-ketoglutarate | 1 | 0 | 0 | 0 | 0 |
| Energy | TCA Cycle | 2-methylcitrate | 0 | 0 | 1 | 1 | 1 |
| Energy | TCA Cycle | aconitate [cis or trans] | 0 | 0 | 1 | 0 | 0 |
| Lipid | Fatty Acid, Dihydroxy | 2R,3R- | 0 | 0 | 1 | 0 | 0 |
| | | dihydroxybutyrate | | | | | |
| Lipid | Fatty Acid, Monohydroxy | 5-hydroxyhexanoate | 1 | 0 | 0 | 0 | 0 |
| Lipid | Inositol Metabolism | inositol 1-phosphate | 1 | 0 | 0 | 0 | 0 |
| | | (I1P) | | | | | |
| Lipid | Monoacylglycerol | 1-linoleoylglycerol | 0 | 1 | 0 | 0 | 0 |
| | | (18:2) | | | | | |
| Nucleotide | Dinucleotide | (3′-5′)- | 0 | 0 | 0 | 0 | 1 |
| | | adenylylguanosine* | | | | | |
| Nucleotide | Purine Metabolism, | 5-aminoimidazole-4- | 0 | 0 | 1 | 0 | 0 |
| | (Hypo)Xanthine/Inosine | carboxamide | | | | | |
| | containing | | | | | | |
| Nucleotide | Purine Metabolism, | N6-methyladenosine | 1 | 0 | 0 | 0 | 0 |
| | Adenine containing | | | | | | |
| Nucleotide | Purine Metabolism, | 2′-O-methyladenosine | 1 | 0 | 0 | 0 | 0 |
| | Adenine containing | | | | | | |
| Nucleotide | Purine Metabolism, | guanine | 1 | 0 | 0 | 0 | 0 |
| | Guanine containing | | | | | | |
| Nucleotide | Purine Metabolism, | guanosine-2′,3′-cyclic | 0 | 1 | 0 | 0 | 0 |
| | Guanine containing | monophosphate | | | | | |
| Nucleotide | Purine Metabolism, | guanosine 3′- | 0 | 1 | 0 | 0 | 0 |
| | Guanine containing | monophosphate (3′- | | | | | |
| | | GMP) | | | | | |
| Nucleotide | Pyrimidine Metabolism, | cytidine 2′,3′-cyclic | 0 | 1 | 0 | 0 | 0 |
| | Cytidine containing | monophosphate | | | | | |
| Nucleotide | Pyrimidine Metabolism, | orotidine | 0 | 0 | 1 | 0 | 0 |
| | Orotate containing | | | | | | |
| Nucleotide | Pyrimidine Metabolism, | dihydroorotate | 0 | 0 | 1 | 0 | 0 |
| | Orotate containing | | | | | | |
| Nucleotide | Pyrimidine Metabolism, | N-carbamoylaspartate | 0 | 0 | 1 | 0 | 0 |
| | Orotate containing | | | | | | |
| Nucleotide | Pyrimidine Metabolism, | thymine | 0 | 0 | 1 | 0 | 0 |
| | Thymine containing | | | | | | |
| Nucleotide | Pyrimidine Metabolism, | 5,6-dihydrouridine | 1 | 0 | 0 | 0 | 0 |
| | Uracil containing | | | | | | |
| Peptide | Gamma-glutamyl Amino | gamma- | 0 | 0 | 1 | 0 | 0 |
| | Acid | glutamylhistidine | | | | | |
| Xenobiotics | Food Component/Plant | quinate | 1 | 0 | 0 | 0 | 0 |
| Xenobiotics | Food Component/Plant | 4-hydroxybenzyl | 1 | 0 | 0 | 0 | 0 |
| | | alcohol | | | | | |
| Xenobiotics | Food Component/Plant | 3-dehydroshikimate | 1 | 0 | 0 | 0 | 0 |
| Xenobiotics | Food Component/Plant | homocitrate | 0 | 0 | 1 | 0 | 0 |

TABLE 48
Metabolites uniquely secreted by individual strains or strain consortia in minimal media.
For individual strains, secreted metabolites with intensities >1.5 fold than remaining two strains on same media. For strain consortia, secreted
metabolites with intensitries >1.5 fold than corresponding individual strains

| | | | | | | Ba | Ba PTA84 + |
|---|---|---|---|---|---|---|---|
| | | | Ba | Ba | Bs | PTA84 + | Ba PTA85 + |
| Super Pathway | Pathway | Metabolite | PTA84 | PTA85 | PTA86 | Ba PTA85 | Bs PTA86 |
| Amino Acid | Alanine and Aspartate | N-acetylasparagine | 0 | 1 | 0 | 0 | 0 |
| | Metabolism | | | | | | |
| Amino Acid | Alanine and Aspartate | N-acetylaspartate (NAA) | 0 | 1 | 0 | 0 | 0 |
| | Metabolism | | | | | | |
| Amino Acid | Creatine Metabolism | guanidinoacetate | 0 | 0 | 1 | 0 | 1 |
| Amino Acid | Glutamate Metabolism | glutamine | 1 | 0 | 0 | 0 | 0 |
| Amino Acid | Glutamate Metabolism | S-1-pyrroline-5-carboxylate | 0 | 1 | 0 | 0 | 0 |
| Amino Acid | Glutamate Metabolism | N-acetylglutamine | 0 | 1 | 0 | 0 | 0 |
| Amino Acid | Glutamate Metabolism | 2-pyrrolidinone | 0 | 1 | 0 | 0 | 0 |
| Amino Acid | Glutamate Metabolism | N-acetylglutamate | 0 | 1 | 0 | 0 | 0 |
| Amino Acid | Glutamate Metabolism | carboxyethyl-GABA | 0 | 0 | 1 | 0 | 0 |
| Amino Acid | Glutamate Metabolism | beta-citrylglutamate | 0 | 0 | 0 | 0 | 1 |
| Amino Acid | Glutathione Metabolism | 2-hydroxybutyrate/2- | 1 | 0 | 0 | 0 | 0 |
| | | hydroxyisobutyrate | | | | | |
| Amino Acid | Glutathione Metabolism | cysteinylglycine | 0 | 0 | 1 | 1 | 0 |
| Amino Acid | Glycine, Serine and | 2-methylserine | 0 | 1 | 0 | 0 | 0 |
| | Threonine Metabolism | | | | | | |
| Amino Acid | Glycine, Serine and | betaine | 0 | 0 | 1 | 0 | 0 |
| | Threonine Metabolism | | | | | | |
| Amino Acid | Glycine, Serine and | N-carbamoylserine | 0 | 0 | 0 | 0 | 1 |
| | Threonine Metabolism | | | | | | |
| Amino Acid | Histidine Metabolism | cis-urocanate | 0 | 1 | 0 | 0 | 0 |
| Amino Acid | Histidine Metabolism | trans-urocanate | 0 | 1 | 0 | 0 | 0 |
| Amino Acid | Histidine Metabolism | formiminoglutamate | 0 | 1 | 0 | 0 | 0 |
| Amino Acid | Histidine Metabolism | 4-imidazoleacetate | 0 | 1 | 0 | 0 | 0 |
| Amino Acid | Histidine Metabolism | 3-methylhistidine | 0 | 0 | 1 | 0 | 0 |
| Amino Acid | Histidine Metabolism | N-acetylhistidine | 0 | 0 | 0 | 1 | 0 |
| Amino Acid | Histidine Metabolism | histidine | 0 | 0 | 0 | 1 | 0 |
| Amino Acid | Leucine, Isoleucine and | 2-hydroxy-3-methylvalerate | 0 | 1 | 0 | 0 | 0 |
| | Valine Metabolism | | | | | | |
| Amino Acid | Leucine, Isoleucine and | N-acetylvaline | 0 | 1 | 0 | 0 | 0 |
| | Valine Metabolism | | | | | | |
| Amino Acid | Leucine, Isoleucine and | isovalerate (C5) | 0 | 1 | 0 | 0 | 0 |
| | Valine Metabolism | | | | | | |
| Amino Acid | Leucine, Isoleucine and | 3-methyl-2-oxobutyrate | 0 | 1 | 0 | 0 | 0 |
| | Valine Metabolism | | | | | | |
| Amino Acid | Leucine, Isoleucine and | methylsuccinate | 0 | 1 | 0 | 0 | 0 |
| | Valine Metabolism | | | | | | |
| Amino Acid | Leucine, Isoleucine and | N-acetylleucine | 0 | 1 | 0 | 0 | 1 |
| | Valine Metabolism | | | | | | |
| Amino Acid | Leucine, Isoleucine and | N-acetylisoleucine | 0 | 1 | 0 | 1 | 0 |
| | Valine Metabolism | | | | | | |
| Amino Acid | Leucine, Isoleucine and | 3-methyl-2-oxovalerate | 0 | 1 | 0 | 0 | 0 |
| | Valine Metabolism | | | | | | |
| Amino Acid | Leucine, Isoleucine and | N-butyryl-leucine | 0 | 0 | 1 | 0 | 0 |
| | Valine Metabolism | | | | | | |
| Amino Acid | Leucine, Isoleucine and | isovalerylglycine | 0 | 0 | 0 | 1 | 0 |
| | Valine Metabolism | | | | | | |
| Amino Acid | Leucine, Isoleucine and | 4-methyl-2-oxopentanoate | 0 | 0 | 0 | 0 | 1 |
| | Valine Metabolism | | | | | | |
| Amino Acid | Lysine Metabolism | N6-acetyllysine | 0 | 1 | 0 | 0 | 0 |
| Amino Acid | Lysine Metabolism | N,N-dimethyl-5-aminovalerate | 0 | 0 | 1 | 0 | 0 |
| Amino Acid | Lysine Metabolism | pipecolate | 0 | 0 | 1 | 0 | 0 |
| Amino Acid | Lysine Metabolism | saccharopine | 0 | 0 | 1 | 0 | 1 |
| Amino Acid | Lysine Metabolism | cadaverine | 0 | 0 | 0 | 0 | 1 |
| Amino Acid | Lysine Metabolism | N6,N6,N6-trimethyllysine | 0 | 0 | 0 | 0 | 1 |
| Amino Acid | Lysine Metabolism | N6-methyllysine | 0 | 0 | 0 | 0 | 1 |
| Amino Acid | Lysine Metabolism | N6,N6-dimethyllysine | 0 | 0 | 0 | 0 | 1 |
| Amino Acid | Methionine, Cysteine, | methionine sulfone | 1 | 0 | 0 | 0 | 0 |
| | SAM and Taurine | | | | | | |
| | Metabolism | | | | | | |
| Amino Acid | Methionine, Cysteine, | homocystine | 0 | 1 | 0 | 0 | 0 |
| | SAM and Taurine | | | | | | |
| | Metabolism | | | | | | |
| Amino Acid | Methionine, Cysteine, | N-acetylmethionine | 0 | 1 | 0 | 1 | 0 |
| | SAM and Taurine | | | | | | |
| | Metabolism | | | | | | |
| Amino Acid | Methionine, Cysteine, | S-adenosylmethionine (SAM) | 0 | 1 | 0 | 0 | 0 |
| | SAM and Taurine | | | | | | |
| | Metabolism | | | | | | |
| Amino Acid | Methionine, Cysteine, | N-acetylmethionine sulfoxide | 0 | 1 | 0 | 0 | 0 |
| | SAM and Taurine | | | | | | |
| | Metabolism | | | | | | |
| Amino Acid | Methionine, Cysteine, | S-methylcysteine | 0 | 0 | 1 | 0 | 0 |
| | SAM and Taurine | | | | | | |
| | Metabolism | | | | | | |
| Amino Acid | Methionine, Cysteine, | 2-hydroxy-4- | 0 | 0 | 1 | 0 | 0 |
| | SAM and Taurine | (methylthio)butanoic acid | | | | | |
| | Metabolism | | | | | | |
| Amino Acid | Phenylalanine | N-acetylphenylalanine | 0 | 1 | 0 | 0 | 0 |
| | Metabolism | | | | | | |
| Amino Acid | Phenylalanine | phenylpyruvate | 0 | 1 | 0 | 0 | 0 |
| | Metabolism | | | | | | |
| Amino Acid | Phenylalanine | phenethylamine | 0 | 1 | 0 | 0 | 0 |
| | Metabolism | | | | | | |
| Amino Acid | Phenylalanine | N-butyryl-phenylalanine | 0 | 0 | 1 | 0 | 0 |
| | Metabolism | | | | | | |
| Amino Acid | Phenylalanine | phenyllactate (PLA) | 0 | 0 | 0 | 1 | 0 |
| | Metabolism | | | | | | |
| Amino Acid | Phenylalanine | 2-hydroxyphenylacetate | 0 | 0 | 0 | 0 | 1 |
| | Metabolism | | | | | | |
| Amino Acid | Phenylalanine | N-succinyl-phenylalanine | 0 | 0 | 0 | 0 | 1 |
| | Metabolism | | | | | | |
| Amino Acid | Polyamine Metabolism | spermine | 0 | 1 | 0 | 1 | 0 |
| Amino Acid | Polyamine Metabolism | spermidine | 0 | 1 | 0 | 1 | 0 |
| Amino Acid | Polyamine Metabolism | (N(1) + N(8))-acetylspermidine | 0 | 1 | 0 | 0 | 0 |
| Amino Acid | Polyamine Metabolism | 5-methylthioadenosine (MTA) | 0 | 1 | 0 | 0 | 0 |
| Amino Acid | Polyamine Metabolism | 4-acetamidobutanoate | 0 | 1 | 0 | 0 | 0 |
| Amino Acid | Polyamine Metabolism | putrescine | 0 | 0 | 1 | 0 | 0 |
| Amino Acid | Polyamine Metabolism | N(1)-acetylspermine | 0 | 0 | 0 | 0 | 1 |
| Amino Acid | Tryptophan Metabolism | anthranilate | 1 | 0 | 0 | 1 | 0 |
| Amino Acid | Tryptophan Metabolism | tryptophan | 0 | 0 | 1 | 1 | 0 |
| Amino Acid | Tryptophan Metabolism | N-acetyltryptophan | 0 | 0 | 0 | 1 | 1 |
| Amino Acid | Tryptophan Metabolism | indolelactate | 0 | 0 | 0 | 1 | 1 |
| Amino Acid | Tyrosine Metabolism | 4-hydroxyphenylpyruvate | 0 | 1 | 0 | 0 | 0 |
| Amino Acid | Tyrosine Metabolism | 3-methoxytyramine | 0 | 1 | 0 | 0 | 0 |
| Amino Acid | Tyrosine Metabolism | tyramine | 0 | 1 | 0 | 0 | 0 |
| Amino Acid | Tyrosine Metabolism | N-acetyltyrosine | 0 | 1 | 0 | 0 | 0 |
| Amino Acid | Tyrosine Metabolism | 3-(4-hydroxyphenyl)lactate | 0 | 0 | 0 | 1 | 1 |
| | | (HPLA) | | | | | |
| Amino Acid | Tyrosine Metabolism | 1-carboxyethyltyrosine | 0 | 0 | 0 | 1 | 0 |
| Amino Acid | Urea cycle; Arginine | N-acetylproline | 0 | 1 | 0 | 0 | 0 |
| | and Proline Metabolism | | | | | | |
| Amino Acid | Urea cycle; Arginine | N-alpha-acetylornithine | 0 | 1 | 0 | 0 | 0 |
| | and Proline Metabolism | | | | | | |
| Amino Acid | Urea cycle; Arginine | N-acetylcitrulline | 0 | 1 | 0 | 0 | 0 |
| | and Proline Metabolism | | | | | | |
| Amino Acid | Urea cycle; Arginine | N-acetylarginine | 0 | 1 | 0 | 0 | 0 |
| | and Proline Metabolism | | | | | | |
| Amino Acid | Urea cycle; Arginine | hydroxyproline | 0 | 1 | 0 | 0 | 0 |
| | and Proline Metabolism | | | | | | |
| Amino Acid | Urea cycle; Arginine | N,N,N-trimethyl-alanylproline | 0 | 0 | 1 | 0 | 0 |
| | and Proline Metabolism | betaine (TMAP) | | | | | |
| Amino Acid | Urea cycle; Arginine | ornithine | 0 | 0 | 1 | 1 | 0 |
| | and Proline Metabolism | | | | | | |
| Amino Acid | Urea cycle; Arginine | N-monomethylarginine | 0 | 0 | 1 | 0 | 1 |
| | and Proline Metabolism | | | | | | |
| Amino Acid | Urea cycle; Arginine | urea | 0 | 0 | 0 | 1 | 0 |
| | and Proline Metabolism | | | | | | |
| Amino Acid | Urea cycle; Arginine | dimethylarginine (ADMA + | 0 | 0 | 0 | 0 | 1 |
| | and Proline Metabolism | SDMA) | | | | | |
| Amino Acid | Urea cycle; Arginine | homocitrulline | 0 | 0 | 0 | 0 | 1 |
| | and Proline Metabolism | | | | | | |
| Carbohydrate | Aminosugar | N-acetyl-glucosamine 1- | 0 | 1 | 0 | 0 | 0 |
| | Metabolism | phosphate | | | | | |
| Carbohydrate | Aminosugar | N-acetylglucosamine/N- | 0 | 1 | 0 | 0 | 0 |
| | Metabolism | acetylgalactosamine | | | | | |
| Carbohydrate | Aminosugar | glucuronate | 0 | 1 | 0 | 0 | 0 |
| | Metabolism | | | | | | |
| Carbohydrate | Aminosugar | N-acetylmuramate | 0 | 0 | 1 | 0 | 0 |
| | Metabolism | | | | | | |
| Carbohydrate | Disaccharides and | sucrose | 0 | 1 | 0 | 1 | 0 |
| | Oligosaccharides | | | | | | |
| Carbohydrate | Fructose, Mannose and | mannose | 0 | 0 | 1 | 0 | 0 |
| | Galactose Metabolism | | | | | | |
| Carbohydrate | Fructose, Mannose and | galactonate | 0 | 0 | 0 | 0 | 1 |
| | Galactose Metabolism | | | | | | |
| Carbohydrate | Fructose, Mannose and | fructose | 0 | 0 | 0 | 0 | 1 |
| | Galactose Metabolism | | | | | | |
| Carbohydrate | Glycolysis, | 3-phosphoglycerate | 0 | 1 | 0 | 0 | 0 |
| | Gluconeogenesis, and | | | | | | |
| | Pyruvate Metabolism | | | | | | |
| Carbohydrate | Glycolysis, | phosphoenolpyruvate (PEP) | 0 | 1 | 0 | 0 | 0 |
| | Gluconeogenesis, and | | | | | | |
| | Pyruvate Metabolism | | | | | | |
| Carbohydrate | Glycolysis, | pyruvate | 0 | 0 | 1 | 1 | 0 |
| | Gluconeogenesis, and | | | | | | |
| | Pyruvate Metabolism | | | | | | |
| Carbohydrate | Glycolysis, | glucose 6-phosphate | 0 | 0 | 0 | 0 | 1 |
| | Gluconeogenesis, and | | | | | | |
| | Pyruvate Metabolism | | | | | | |
| Carbohydrate | Glycolysis, | Isobar: hexose diphosphates | 0 | 0 | 0 | 0 | 1 |
| | Gluconeogenesis, and | | | | | | |
| | Pyruvate Metabolism | | | | | | |
| Carbohydrate | Pentose Metabolism | sedoheptulose | 0 | 1 | 0 | 0 | 0 |
| Carbohydrate | Pentose Metabolism | ribulonate/xylulonate/lyxonate* | 0 | 0 | 0 | 0 | 1 |
| Carbohydrate | Pentose Metabolism | arabonate/xylonate | 0 | 0 | 0 | 0 | 1 |
| Carbohydrate | Pentose Metabolism | ribitol | 0 | 0 | 0 | 0 | 1 |
| Carbohydrate | Pentose Phosphate | sedoheptulose-7-phosphate | 0 | 1 | 0 | 0 | 0 |
| | Pathway | | | | | | |
| Cofactors and | Ascorbate and Aldarate | oxalate (ethanedioate) | 0 | 0 | 1 | 1 | 0 |
| Vitamins | Metabolism | | | | | | |
| Cofactors and | Ascorbate and Aldarate | glucarate (saccharate) | 0 | 0 | 0 | 0 | 1 |
| Vitamins | Metabolism | | | | | | |
| Cofactors and | Nicotinate and | nicotinamide ribonucleotide | 1 | 0 | 0 | 0 | 0 |
| Vitamins | Nicotinamide | (NMN) | | | | | |
| | Metabolism | | | | | | |
| Cofactors and | Nicotinate and | nicotinate ribonucleoside | 0 | 1 | 0 | 0 | 0 |
| Vitamins | Nicotinamide | | | | | | |
| | Metabolism | | | | | | |
| Cofactors and | Nicotinate and | nicotinate | 0 | 1 | 0 | 0 | 0 |
| Vitamins | Nicotinamide | | | | | | |
| | Metabolism | | | | | | |
| Cofactors and | Nicotinate and | nicotinamide riboside | 0 | 0 | 1 | 0 | 0 |
| Vitamins | Nicotinamide | | | | | | |
| | Metabolism | | | | | | |
| Cofactors and | Nicotinate and | trigonelline (N′- | 0 | 0 | 1 | 0 | 0 |
| Vitamins | Nicotinamide | methylnicotinate) | | | | | |
| | Metabolism | | | | | | |
| Cofactors and | Nicotinate and | NAD+ | 0 | 0 | 0 | 1 | 0 |
| Vitamins | Nicotinamide | | | | | | |
| | Metabolism | | | | | | |
| Cofactors and | Pantothenate and CoA | pantothenate (Vitamin B5) | 0 | 1 | 0 | 0 | 1 |
| Vitamins | Metabolism | | | | | | |
| Cofactors and | Pantothenate and CoA | pantoate | 0 | 0 | 0 | 0 | 1 |
| Vitamins | Metabolism | | | | | | |
| Cofactors and | Pterin Metabolism | pterin | 0 | 1 | 0 | 0 | 0 |
| Vitamins | | | | | | | |
| Cofactors and | Vitamin B6 Metabolism | pyridoxine (Vitamin B6) | 0 | 0 | 1 | 0 | 0 |
| Vitamins | | | | | | | |
| Energy | TCA Cycle | citraconate/glutaconate | 0 | 1 | 0 | 0 | 0 |
| Energy | TCA Cycle | fumarate | 0 | 0 | 0 | 1 | 1 |
| Energy | TCA Cycle | isocitric lactone | 0 | 0 | 0 | 0 | 1 |
| Energy | TCA Cycle | malate | 0 | 0 | 0 | 0 | 1 |
| Lipid | Carnitine Metabolism | deoxycarnitine | 0 | 0 | 1 | 1 | 0 |
| Lipid | Fatty Acid Metabolism | 5-dodecenoylcarnitine (C12:1) | 0 | 1 | 0 | 0 | 0 |
| | (Acyl Carnitine, | | | | | | |
| | Monounsaturated) | | | | | | |
| Lipid | Fatty Acid, Amide | eicosenamide (20:1)* | 0 | 0 | 1 | 0 | 0 |
| Lipid | Fatty Acid, | azelate (C9-DC) | 1 | 0 | 0 | 0 | 0 |
| | Dicarboxylate | | | | | | |
| Lipid | Fatty Acid, | 2-hydroxyglutarate | 0 | 1 | 0 | 0 | 0 |
| | Dicarboxylate | | | | | | |
| Lipid | Fatty Acid, Dihydroxy | 2S,3R-dihydroxybutyrate | 0 | 0 | 1 | 0 | 0 |
| Lipid | Fatty Acid, Dihydroxy | 2R,3R-dihydroxybutyrate | 0 | 0 | 0 | 1 | 0 |
| Lipid | Fatty Acid, | 5-hydroxyhexanoate | 0 | 1 | 0 | 0 | 1 |
| | Monohydroxy | | | | | | |
| Lipid | Fatty Acid, | 3-hydroxyoctanoate | 0 | 1 | 0 | 0 | 0 |
| | Monohydroxy | | | | | | |
| Lipid | Fatty Acid, | 3-hydroxyhexanoate | 0 | 0 | 0 | 0 | 1 |
| | Monohydroxy | | | | | | |
| Lipid | Glycerolipid | glycerol 3-phosphate | 0 | 1 | 0 | 0 | 0 |
| | Metabolism | | | | | | |
| Lipid | Inositol Metabolism | chiro-inositol | 0 | 0 | 1 | 1 | 1 |
| Lipid | Inositol Metabolism | myo-inositol | 0 | 0 | 0 | 0 | 1 |
| Lipid | Lysophospholipid | 1-stearoyl-GPE (18:0) | 0 | 1 | 0 | 0 | 0 |
| Lipid | Lysophospholipid | 1-palmitoyl-GPE (16:0) | 0 | 0 | 1 | 0 | 0 |
| Lipid | Mevalonate Metabolism | 3-hydroxy-3-methylglutarate | 0 | 0 | 1 | 0 | 1 |
| Lipid | Mevalonate Metabolism | mevalonate | 0 | 0 | 0 | 0 | 1 |
| Lipid | Monoacylglycerol | 1-linoleoylglycerol (18:2) | 0 | 0 | 1 | 0 | 0 |
| Lipid | Phospholipid | choline | 0 | 0 | 1 | 0 | 0 |
| | Metabolism | | | | | | |
| Lipid | Phospholipid | glycerophosphorylcholine | 0 | 0 | 1 | 1 | 0 |
| | Metabolism | (GPC) | | | | | |
| Lipid | Phospholipid | glycerophosphoinositol* | 0 | 0 | 0 | 0 | 1 |
| | Metabolism | | | | | | |
| Lipid | Phospholipid | glycerophosphoethanolamine | 0 | 0 | 0 | 0 | 1 |
| | Metabolism | | | | | | |
| Lipid | Short Chain Fatty Acid | butyrate/isobutyrate (4:0) | 0 | 1 | 0 | 0 | 0 |
| Nucleotide | Dinucleotide | (3′-5′)-uridylyladenosine | 1 | 0 | 0 | 1 | 0 |
| Nucleotide | Dinucleotide | (3′-5′)-uridylyluridine | 0 | 0 | 1 | 1 | 0 |
| Nucleotide | Dinucleotide | (3′-5′)-cytidylyladenosine | 0 | 0 | 0 | 1 | 0 |
| Nucleotide | Purine Metabolism, | xanthine | 0 | 1 | 0 | 1 | 0 |
| | (Hypo)Xanthine/Inosine | | | | | | |
| | containing | | | | | | |
| Nucleotide | Purine Metabolism, | xanthosine | 0 | 1 | 0 | 0 | 0 |
| | (Hypo)Xanthine/Inosine | | | | | | |
| | containing | | | | | | |
| Nucleotide | Purine Metabolism, | 5-aminoimidazole-4- | 0 | 0 | 0 | 1 | 1 |
| | (Hypo)Xanthine/Inosine | carboxamide | | | | | |
| | containing | | | | | | |
| Nucleotide | Purine Metabolism, | adenosine-2′,3′-cyclic | 1 | 0 | 0 | 0 | 0 |
| | Adenine containing | monophosphate | | | | | |
| Nucleotide | Purine Metabolism, | adenosine | 1 | 0 | 0 | 0 | 0 |
| | Adenine containing | | | | | | |
| Nucleotide | Purine Metabolism, | adenine | 1 | 0 | 0 | 0 | 0 |
| | Adenine containing | | | | | | |
| Nucleotide | Purine Metabolism, | AMP | 1 | 0 | 0 | 1 | 0 |
| | Adenine containing | | | | | | |
| Nucleotide | Purine Metabolism, | N6-methyladenosine | 0 | 1 | 0 | 0 | 0 |
| | Adenine containing | | | | | | |
| Nucleotide | Purine Metabolism, | 1-methyladenine | 0 | 1 | 0 | 0 | 0 |
| | Adenine containing | | | | | | |
| Nucleotide | Purine Metabolism, | 2′-O-methyladenosine | 0 | 0 | 0 | 0 | 1 |
| | Adenine containing | | | | | | |
| Nucleotide | Purine Metabolism, | 2′-AMP | 0 | 0 | 0 | 0 | 1 |
| | Adenine containing | | | | | | |
| Nucleotide | Purine Metabolism, | N6-succinyladenosine | 0 | 0 | 0 | 0 | 1 |
| | Adenine containing | | | | | | |
| Nucleotide | Purine Metabolism, | guanosine | 0 | 1 | 0 | 0 | 0 |
| | Guanine containing | | | | | | |
| Nucleotide | Purine Metabolism, | 7-methylguanine | 0 | 1 | 0 | 0 | 0 |
| | Guanine containing | | | | | | |
| Nucleotide | Purine Metabolism, | guanosine 2′-monophosphate | 0 | 0 | 0 | 0 | 1 |
| | Guanine containing | (2′-GMP)* | | | | | |
| Nucleotide | Pyrimidine Metabolism, | cytidine 2′,3′-cyclic | 1 | 0 | 0 | 0 | 0 |
| | Cytidine containing | monophosphate | | | | | |
| Nucleotide | Pyrimidine Metabolism, | 5-methylcytidine | 0 | 1 | 0 | 0 | 0 |
| | Cytidine containing | | | | | | |
| Nucleotide | Pyrimidine Metabolism, | CMP | 0 | 0 | 0 | 1 | 0 |
| | Cytidine containing | | | | | | |
| Nucleotide | Pyrimidine Metabolism, | cytidine | 0 | 0 | 0 | 1 | 0 |
| | Cytidine containing | | | | | | |
| Nucleotide | Pyrimidine Metabolism, | 5-methylcytosine | 0 | 0 | 0 | 0 | 1 |
| | Cytidine containing | | | | | | |
| Nucleotide | Pyrimidine Metabolism, | orotidine | 0 | 1 | 0 | 0 | 0 |
| | Orotate containing | | | | | | |
| Nucleotide | Pyrimidine Metabolism, | N-carbamoylaspartate | 0 | 1 | 0 | 0 | 0 |
| | Orotate containing | | | | | | |
| Nucleotide | Pyrimidine Metabolism, | dihydroorotate | 0 | 0 | 0 | 1 | 0 |
| | Orotate containing | | | | | | |
| Nucleotide | Pyrimidine Metabolism, | thymine | 0 | 1 | 0 | 0 | 0 |
| | Thymine containing | | | | | | |
| Nucleotide | Pyrimidine Metabolism, | uridine-2′,3′-cyclic | 1 | 0 | 0 | 0 | 0 |
| | Uracil containing | monophosphate | | | | | |
| Nucleotide | Pyrimidine Metabolism, | pseudouridine | 0 | 1 | 0 | 0 | 0 |
| | Uracil containing | | | | | | |
| Nucleotide | Pyrimidine Metabolism, | 5,6-dihydrouridine | 0 | 1 | 0 | 0 | 0 |
| | Uracil containing | | | | | | |
| Nucleotide | Pyrimidine Metabolism, | 3-ureidopropionate | 0 | 0 | 1 | 0 | 0 |
| | Uracil containing | | | | | | |
| Nucleotide | Pyrimidine Metabolism, | UMP | 0 | 0 | 0 | 1 | 0 |
| | Uracil containing | | | | | | |
| Nucleotide | Pyrimidine Metabolism, | uridine | 0 | 0 | 0 | 1 | 0 |
| | Uracil containing | | | | | | |
| Nucleotide | Pyrimidine Metabolism, | uridine 2′-monophosphate (2′- | 0 | 0 | 0 | 0 | 1 |
| | Uracil containing | UMP)* | | | | | |
| Nucleotide | Pyrimidine Metabolism, | 2′-O-methyluridine | 0 | 0 | 0 | 0 | 1 |
| | Uracil containing | | | | | | |
| Partially | Partially Characterized | pentose acid* | 0 | 0 | 1 | 0 | 1 |
| Characterized | Molecules | | | | | | |
| Molecules | | | | | | | |
| Peptide | Dipeptide | cyclo(gly-phe) | 0 | 0 | 1 | 0 | 0 |
| Peptide | Dipeptide | tryptophylglycine | 0 | 0 | 1 | 0 | 0 |
| Peptide | Gamma-glutamyl | gamma-glutamyltyrosine | 1 | 0 | 0 | 0 | 0 |
| | Amino Acid | | | | | | |
| Peptide | Gamma-glutamyl | gamma-glutamylphenylalanine | 1 | 0 | 0 | 0 | 0 |
| | Amino Acid | | | | | | |
| Xenobiotics | Benzoate Metabolism | benzoate | 0 | 1 | 0 | 0 | 0 |
| Xenobiotics | Benzoate Metabolism | hippurate | 0 | 0 | 0 | 0 | 1 |
| Xenobiotics | Chemical | 2,4-di-tert-butylphenol | 0 | 1 | 0 | 0 | 0 |
| Xenobiotics | Drug - Topical Agents | 2,6-dihydroxybenzoic acid | 0 | 0 | 1 | 0 | 0 |
| Xenobiotics | Food Component/Plant | 1-kestose | 1 | 0 | 0 | 0 | 0 |
| Xenobiotics | Food Component/Plant | 2-isopropylmalate | 0 | 1 | 0 | 0 | 0 |
| Xenobiotics | Food Component/Plant | 4-hydroxybenzyl alcohol | 0 | 1 | 0 | 0 | 0 |
| Xenobiotics | Food Component/Plant | 3-dehydroshikimate | 0 | 1 | 0 | 0 | 0 |
| Xenobiotics | Food Component/Plant | maltol | 0 | 0 | 1 | 1 | 0 |
| Xenobiotics | Food Component/Plant | histidine betaine (hercynine)* | 0 | 0 | 1 | 0 | 0 |
| Xenobiotics | Food Component/Plant | histidinol | 0 | 0 | 0 | 0 | 1 |
| Xenobiotics | Food Component/Plant | homocitrate | 0 | 0 | 0 | 0 | 1 |
| Xenobiotics | Food Component/Plant | pyrraline | 0 | 0 | 0 | 0 | 1 |
| Xenobiotics | Food Component/Plant | 2-keto-3-deoxy-gluconate | 0 | 0 | 0 | 0 | 1 |

[0551] A principal component analysis (PCA) of the normalized metabolite abundances showed a clear separation between samples from rich and minimal media along the first principal component (˜70% explained variance), both in the supernatant and pellet (TABLE 51 and TABLE 53). Additionally, the separation between samples along the two first principal components suggested that under the tested growth conditions the strains and consortia differ in their profiles of secreted/consumed metabolites as well as their cell-pellet small-molecule content.

[0552] Interestingly, looking at the metabolite profiles in the culture supernatant (TABLE 51), all strains and strain combinations tightly clustered in the rich media samples while they separated under minimal media conditions. Indeed, looking at the number of secreted metabolites under each condition (abundance>1.5 fold above media controls, FIG. 44A), cells in all cultures secreted approximately 100 named metabolites in rich media with a median Jaccard similarity of 0.8, compared to a range of 134 to 250 secreted metabolites in minimal media with only 0.54 median overlap (Mann-Whitney p-value=0.01). This shows that especially under minimal media conditions, each strain or consortia secretes distinct sets of small molecules.

[0553] In rich media, Ba PTA84 secreted the largest number of metabolites (104 metabolites) and it had the fewest uniquely secreted metabolites (abundance>1.5 fold higher than other individual strains) across both media. Thirteen unique metabolites related to amino acid, central carbon, nucleotide, and lipid metabolisms as well as some xenobiotic compounds (i.e. quinate, 4-hydroxybenzyl alcohol, and 3-dehydroshikimate) were detected.

[0554] As expected, the three-strain consortium was found to have the largest number of secreted metabolites in minimal media, a total of 250 metabolites. These include host beneficial metabolites such as betaine, kynurenine, indolactate, tyrosol, citrulline, tricarballylate, vitamins B5 and B6, hippurate, and kestose. Of all three single strains, the culture supernatant of Bs PTA86 carried the highest number of metabolites in minimal media (219 metabolites), followed by Ba PTA85 and Ba PTA84 with 195 and 130 metabolites, respectively. Ba PTA85 had the greatest number of unique secreted metabolites, a total 78 metabolites. The larger number of secreted metabolites under minimal media conditions was partly due to a higher number of amino acid metabolism intermediates, followed by nucleotide and carbohydrate metabolites (FIG. 44B). Thus, our results suggest that the different strains may use different metabolic strategies to synthesize amino acids/proteins, nucleotide, and carbohydrate molecules given a limited nutrient availability.

[0555] Genome Properties of Ba PTA84 and PTA85, and Bs PTA86

[0556] The genomes of Ba PTA84, Ba PTA85, and Bs PTA86 were sequenced by PacBio sequencing. Assembly of Ba PTA84 and Bs PTA86 genomes yielded 1 contig each while the Ba PTA85 assembly contained 2 contigs—a large 4,084,681 bp contig and a smaller 231,132 bp long contig. The genome properties and annotation of different features are summarized in TABLE 49. The whole-genome sequences were deposited at DDBJ/ENA/GenBank under BioProject numbers PRJNA701126 and PRJNA701127.

TABLE 49
Genome Assembly and Annotation Summary of Bacillus spp.

| Feature | PTA-84 | PTA-85 | PTA-86 |
|---|---|---|---|
| No. sequences | 1 | 2 | 1 |
| Total genome size (bp) | 4,090,715 | 4,315,813 | 4,089,676 |
| CDS | 3,957 | 4,277 | 4,027 |
| Miscellaneous feature | 8 | 12 | 8 |
| Mobile Elements | 2 | 2 | 2 |
| Non-coding RNA | 11 | 11 | 11 |
| Operons | 753 | 844 | 747 |
| Ribosomal RNA | 27 | 27 | 30 |
| Ribosomal binding sites | 4,004 | 4,212 | 4,026 |
| Transcription Terminators | 2,082 | 2,197 | 2,196 |
| Riboswitch | 44 | 45 | 48 |
| Transfer RNA | 86 | 87 | 86 |
| Transfer-messenger RNA | 1 | 1 | 1 |

[0557] Core-Genomes of Ba PTA84, Ba PTA85, and Bs PTA86

[0558] Ortholog analysis was performed to identify paralogous and/or orthologous relationships between the genomes of Ba PTA84, Ba PTA85, and Bs PTA86. Ba PTA84 shared the highest number of genes with 99.4% gene presentation in orthogroups while Ba PTA85, and Bs PTA86 shared 93.6% and respectively (TABLE 50). A total of 3,024 orthologs were shared among all three strains while 586 orthologs were shared only between Ba PTA84 and Ba PTA85, 60 orthologs between Ba PTA84 and Bs PTA86, and 34 orthologs were shared only between Ba PTA85, and Bs PTA86.

TABLE 50
Summary of Ortholog Statistics of the
Ba PTA84, Ba PTA85, and the Bs PTA86

| Feature | PTA84 | PTA85 | PTA86 |
|---|---|---|---|
| Number of genes | 3,884^{a} | 4,189 | 4,012 |
| Number of genes in orthogroups | 3,862 | 3,919 | 3,614 |
| Number of unassigned genes | 22 | 270 | 398 |
| Percentage of genes in orthogroups | 99.4 | 93.6 | 90.1 |
| Percentage of unassigned genes | 0.6 | 6.4 | 9.9 |
| Number of orthogroups containing species | 3,670 | 3,668 | 3,146 |
| Percentage of orthogroups containing species | 97.7 | 97.7 | 83.8 |
| Number of species-specific orthogroups | — | 24 | 28 |
| Number of genes in species-specific | — | 53 | 62 |
| orthogroups | | | |
| Percentage of genes in species-specific | — | 1.3 | 1.5 |
| orthogroups | | | |

[0559] Phylogenetic analysis of Ba PTA84, Ba PTA85, and Bs PTA86—Phylogenetic relationships of the three genomes were explored with UBCG v3.0 which employs a set of 92 single-copy core genes commonly present in all bacterial genomes. Ba PTA84, Ba PTA85 and Bs PTA86 genomes were compared against the genomes of B. amyloliquifaciens, B. velezensis and B. subtilis strains along with Lactobacillus reuterii as an outgroup (Accession numbers: AL009126, CP000560, CP002627, CP002634, CP002927, HE617159, HG514499, JMEF01000001, CP005997, CP009748, CP009749, CP011115, LHCC01000001, CP014471 and QVMX01000001). Both strains Ba PTA84 and Ba PTA85 showed closest relationship to Bacillus amyloliquefaciens B4 while Bs PTA86 showed closest relationship to Bacillus subtilis subsp. Subtilis 168.

[0560] Genome analyses of Ba PTA84, Ba PTA85, and Bs PTA86—The assembled genome sequences of 3 Bacillus strains were annotated for the following potential probiotic properties, enzymes, antioxidants, bacteriocins, and secondary metabolites, and for the presence of genes of potential safety concerns such as genes encoding toxins, virulence factors, and antimicrobial resistance genes. A detailed description of each of the above-mentioned features is described below.

[0561] Selected enzymes analyses—TABLE 51 illustrates the presence and absence of genes encoding selected digestive enzymes identified in the Bacillus genomes. All three Bacillus genomes encode lipase, 3-phytase, alpha-amylase, endo-1,4-β xylanase A, glucanase,β-glucanase, β-mannanase, pectin lyase, and alpha galctosidase. Bs PTA86 carried two copies of β-mannanase genes, Table 54. 13-mannanase catalyzes the hydrolysis of β-1,4-linkage of glucomannan releasing mannan oligosaccharide (24, 54). This enzyme along with phytase, xylanase, amylase are added as feed ingredients to improve feed digestibility (55-57). Of the three Bacillus genomes, only Bs PTA86 possessed pullulanase, oligo-1,6-glucosidase, and glycogen degradating enzymes such as 1,4-alpha-glucan branching enzyme. A complete list of enzymes in the three Bacillus genomes are presented in TABLE 54.

TABLE 51

| | Ba PTA84 | Ba PTA85 | Bs PTA86 |
|---|---|---|---|
| Enzyme | (strain 24) | (strain 36) | (strain 105) |
| Lipase | Present | Present | Present |
| 3-phytase | Present | Present | Present |
| Alpha-amylase | Present | Presen Present t | Present |
| Endo-1,4-beta-zylanase A | Present | Present | Present |
| Beta-glucanase | Present | Present | Present |
| Beta-mannanase | Present | Present | Present |
| | | | (Multicopy) |
| Pectin lyase | Present | Present | Present |
| Alpha-galactosidase | Present | Present | Present |
| 1,4-Alpha-glucan branching | Absent | Absent | Present |
| enzyme | | | |
| Pullulanase | Absent | Absent | Present |
| Oligo-1,6-glucosidase 1 | Absent | Absent | Present |

[0562] Secondary metabolites—Secondary metabolite clusters accounted for 20, 20, and 12% of the genomes of Bacillus Ba PTA84, Ba PTA85, and Bs PTA86, respectively. TABLE 52 illustrates the respective clusters for each Bacillus genome. Ba PTA84 and Ba PTA85 genomes contained 13 secondary metabolite clusters whereas Bs PTA86 genome encoded for 10 clusters. More than half of the clusters were contributed by biosynthetic genes for antimicrobial peptides (AMPs). Ba PTA84 and Ba PTA85 genomes encoded for ribosomally-synthesized lichenicidin A, circularin, LCI, and salicylate containing AMPs that were not found in Bs PTA86 genome. The latter possessed subtilosin A, a cyclic antimicrobial peptide that are potent against some Gram positive and Gram negative bacteria such as Listeria monocytogenes, Enterococcus faecalis, Porphyromonas gingivalis, Klebsiella rhizophila, Streptococcus pyogenes and Shigella sonnei, Pseudomonas aeruginosa and Staphylococcus aureus (58-60). For non-ribosomally synthesized AMPs, Ba PTA84 and Ba PTA 85 carried plipastatin, surfactin, bacillibactin, bacilysin, and gramicidin. Only the latter was absent in Bs PTA 86. TABLE 53 provides a tabulation and comparison of some antimicrobial peptides and TABLE 54 provides digestive enzymes provided by the strains.

TABLE 52
Secondary Metabolites Gene Clusters
of Ba PTA84, Ba PTA85, and Bs PTA86

| Type | PTA8 | PTA | PTA |
|---|---|---|---|
| Class/Cluster* | 4 | 85 | 86 |

Bacteriocin and RiPPs class

| | | | |
|---|---|---|---|
| Amylocyclicin | 1 | 1 | 0 |
| ComX1 | 1 | 1 | 0 |
| LCI | 1 | 1 | 0 |
| Lanthipeptide_class_II | 1 | 1 | 0 |
| Competence | 0 | 0 | 1 |
| Subtilosin_(SboX) | 0 | 0 | 1 |

Secondary metabolite biosynthesis gene cluster

| | | | |
|---|---|---|---|
| CDPS | 0 | 0 | 1 |
| NRPS | 1 | 1 | 2 |
| NRPS, PKS-like, T3PKS, transAT-PKS, | 0 | 0 | 1 |
| transAT-PKS-like | | | |
| NRPS, T3PKS, transAT-PKS, transAT-PKS-like | 1 | 1 | 0 |
| NRPS, bacteriocin | 1 | 1 | 0 |
| NRPS, betalactone | 0 | 0 | 1 |
| NRPS, betalactone, transAT-PKS | 1 | 1 | 0 |
| NRPS, trans AT-PKS | 1 | 1 | 0 |
| PKS-like | 1 | 1 | 0 |
| T3PKS | 1 | 1 | 1 |
| head_to_tail, sactipeptide | 0 | 0 | 1 |
| lanthipeptide | 1 | 1 | 0 |
| terpene | 2 | 2 | 2 |
| transAT-PKS | 1 | 1 | 0 |
| transAT-PKS, transAT-PKS-like | 1 | 1 | 0 |
| other | 1 | 1 | 1 |

*Abbreviations, RiPP, ribosomally synthesized and post-translationally modified peptides; NRPS, Non-Ribosomal Peptide Synthase; PKS, polyketide synthasePolyketide Synthase; T3PKS, type III polyketide synthase; trans-Type 3-PKS; AT-PKS, trans-acyltransferase polyketide synthase. Acyltransferase PKS.

TABLE 53
Antimicrobial peptides

| | Ba PTA84 | Ba PTA85 | Bs PTA86 |
|---|---|---|---|
| PEPTIDE | (strain 24) | (strain 36) | (strain 105) |
| Ribosomally-synthesized | | | |
| antimicrobial peptides | | | |
| Lichenicidin A | Present | Present | Absent |
| Circularin | Present | Present | Absent |
| LCI | Present | Present | Absent |
| Subtilosin A | Absent | Absent | Present |
| Salicylate containing AMPs | | Present | Absent |
| Non-Ribosomally-synthesized | | | |
| antimicrobial peptides | | | |
| Plipastatin | Present | Present | Present |
| Surfactin | Present | Present | Present |
| Bacillibactin | Present | Present | Present |
| Bacilysin | Present | Present | Present |
| Gramicidin/Tyrocidin | Present | Present | Absent |

TABLE 54
Putative digestive enzymes identified in the genomes of B. amyloliquefaciens
PTA-84 and PTA85, and B. subtilis PTA-85

| | Accession | B. amyloliquefaciens | B. amyloliquefaciens | B. subtilis |
|---|---|---|---|---|
| Gene Description | Number | PTA-84 | PTA-85 | PTA-86 |
| 1,4-alpha-glucan branching enzyme GlgB | AGA22754.1 | None | None | JS609_03093 |
| 6-phospho-beta-galactosidase | QDK89482.1 | JS608_01655 | JTE87_02630 | None |
| 6-phospho-beta-glucosidase GmuD | QDK91913.1 | JS608_00187 | JTE87_00044 | JS609_00629 |
| Alpha-amylase | BAT21551.1 | JS608_00728 | JTE87_03556 | JS609_00345 |
| Alpha-galactosidase | QDK91116.1 | JS608_03384 | JTE87_00899 | JS609_03025 |
| Alpha-galacturonidase | ASB68722.1 | None | None | JS609_00767 |
| Aryl-phospho-beta-D-glucosidase BglA | QDK90194.1 | JS608_02396 | JTE87_01892 | JS609_04055 |
| Aryl-phospho-beta-D-glucosidase BgIC | ARV97270.1 | None | None | JS609_00386 |
| Aryl-phospho-beta-D-glucosidase BglH | QAS10023.1 | None | None | JS609_03976 |
| Beta-glucanase | AYL88759.1 | JS608_00217 | JTE87_00014 | JS609_03959 |
| Beta-glucanase | AYL88759.1 | JS608_00217 | JTE87_04069 | None |
| Beta-hexosaminidase | QDK88534.1 | JS608_00614 | JTE87_03671 | JS609_00211 |
| Beta-mannanase | | JS608_00188 | None | JS609_00618 |
| | | None | None | None |
| Cephalosporin-C deacetylase | QDK88655.1 | JS608_00742 | JTE87_03542 | JS609_00359 |
| Cortical fragment-lytic enzyme | ATC51419.1 | JS608_00424 | JTE87_03863 | JS609_00022 |
| Demethyllactenocin mycarosyltransferase | QDK88875.1 | JS608_00988 | JTE87_03296 | JS609_00617 |
| Endo-1,4-beta-xylanase A | QDK91715.1 | JS608_04031 | JTE87_00249 | JS609_01995 |
| Endoglucanase | QDK90074.1 | JS608_02270 | None | JS609_01916 |
| Endoglucanase | CCF05300.1 | None | None | None |
| General stress protein A | QDK91887.1 | JS608_00162 | JTE87_00069 | JS609_03892 |
| GlcNAc-binding protein A | QEQ03549.1 | JS608_02218 | JTE87_02071 | None |
| Glycogen phosphorylase | AIX08721.1 | None | None | JS609_03089 |
| Glycogen synthase | QAW13524.1 | None | None | JS609_03090 |
| Intracellular maltogenic amylase | AMR45682.1 | None | None | JS609_03485 |
| L-Ala--D-Glu endopeptidase | QGT57119.1 | JS608_03605 | JTE87_00677 | JS609_03258 |
| Maltose-6′-phosphate glucosidase | QDK89133.1 | JS608_01270 | JTE87_03016 | JS609_00864 |
| Melibiose/raffinose/stachyose import | QEK97784.1 | JS608_03383 | JTE87_00900 | JS609_03024 |
| permease protein MelC | | | | |
| Membrane-bound lytic murein | QDK89432.1 | JS608_01601 | JTE87_02684 | JS609_01215 |
| transglycosylase F | | | | |
| Membrane-bound lytic murein | QDK90428.1 | JS608_02724 | None | None |
| transglycosylase F | | | | |
| N-acetyl-alpha-D-glucosaminyl L-malate | QEQ03843.1 | JS608_03770 | JTE87_00512 | JS609_02193 |
| deacetylase 1 | | | | |
| N-acetylglucosamine-6-phosphate | ASB54801.1 | JS608_03873 | JTE87_01560 | JS609_03525 |
| deacetylase | | | | |
| N-acetylglucosamine-6-phosphate | ASB54800.1 | None | None | None |
| deacetylase | | | | |
| N-acetylglucosaminyldiphosphoundecaprenol | QDK91629.1 | JS608_03942 | JTE87_00338 | JS609_03617 |
| N-acetyl-beta-D-mannosaminyltransferase | | | | |
| Oleandomycin glycosyltransferase | QDK89494.1 | JS608_01668 | JTE87_01911 | JS609_01294 |
| Oleandomycin glycosyltransferase | QDK90176.1 | JS608_02376 | JTE87_02617 | JS609_02068 |
| Oligo-1,6-glucosidase | AKD24292.1 | JS608_03494 | JTE87_00789 | JS609_03151 |
| Oligo-1,6-glucosidase 1 | QAW18252.1 | None | None | JS609_03479 |
| 3-phytase | | JS608_02425 | JTE87_01863 | JS609_02112 |
| Pectate lyase | QDK89071.1 | JS608_01201 | JTE87_03083 | JS609_00804 |
| Pectate lyase C | AIC99792.1 | None | None | JS609_03519 |
| Pectin lyase | QDK91950.1 | JS608_00231 | JTE87_04055 | JS609_01975 |
| Penicillin-binding protein 1A/1B | QDK90466.1 | JS608_02709 | None | JS609_02178 |
| Penicillin-binding protein 1A/1B | QDK90466.1 | JS608_02709 | None | None |
| Penicillin-binding protein 1F | QDK89310.1 | JS608_01475 | JTE87_02812 | JS609_01067 |
| Penicillin-binding protein 2D | QDK91796.1 | JS608_00067 | JTE87_00164 | JS609_03799 |
| Penicillin-binding protein 4 | QDK91217.1 | JS608_03518 | None | JS609_03174 |
| Peptidoglycan-N-acetylglucosamine | QDK89265.1 | JS608_01429 | JTE87_01216 | JS609_01025 |
| deacetylase | | | | |
| Peptidoglycan-N-acetylglucosamine | QDK90813.1 | JS608_03066 | JTE87_02858 | None |
| deacetylase | | | | |
| Peptidoglycan-N-acetylmuramic acid | QEQ05952.1 | JS608_01255 | JTE87_03031 | JS609_00844 |
| deacetylase PdaA | | | | |
| Peptidoglycan-N-acetylmuramic acid | AIX06967.1 | None | None | JS609_01282 |
| deacetylase PdaC | | | | |
| Processive diacylglycerol beta- | QAV83859.1 | None | None | JS609_01417 |
| glucosyltransferase | | | | |
| Processive diacylglycerol beta- | QDK90264.1 | JS608_02475 | JTE87_01812 | JS609_02138 |
| glucosyltransferase | | | | |
| Pullulanase | AYA43052.1 | None | | JS609_02990 |
| putative 6-phospho-beta-glucosidase | QDK91899.1 | JS608_00173 | JTE87_00058 | JS609_03909 |
| putative esterase YxiM | AOY05484.1 | None | None | JS609_03964 |
| putative oligo-1,6-glucosidase 2 | AHC40869.1 | None | None | JS609_00325 |
| putative protein YqbO | QDK89544.1 | None | None | JS609_01344 |
| putative rhamnogalacturonan | ASZ60459.1 | None | None | JS609_00761 |
| acetylesterase YesY | | | | |
| Putative sporulation-specific glycosylase | CAB12390.2 | None | None | JS609_00616 |
| YdhD | | | | |
| Putative sporulation-specific glycosylase | QDK89600.1 | JS608_01783 | JTE87_02504 | JS609_03425 |
| YdhD | | | | |
| Rhamnogalacturonan acetylesterase RhgT | QFY87628.1 | None | None | JS609_00756 |
| Rhamnogalacturonan endolyase YesW | QAT44941.1 | None | None | JS609_00759 |
| Rhamnogalacturonan exolyase YesX | AIX06475.1 | None | None | JS609_00760 |
| Trehalose-6-phosphate hydrolase | AVX18210.1 | JS608_01233 | JTE87_03053 | JS609_00827 |
| UDP-N-acetylglucosamine--N- | QDK89788.1 | JS608_00110, | JTE87_00121, | JS609_01610, |
| acetylmuramyl- | | JS608_01977 | JTE87_02314 | JS609_03834 |
| (pentapeptide)pyrophosphoryl- | | | | |
| undecaprenol N-acetylglucosamine | | | | |
| transferase | | | | |

[0563] Genes of Safety Concern

[0564] To search for genes encoding known virulence factors, toxins, and antimicrobial resistance (AMR), we applied a screening approach using cutoff values according to an EFSA guideline (61), sequence identity and coverage values higher than 80 and 70%, respectively. According to the analysis, genes for known virulence factors or toxins were not identified in the genomes of three Bacillus strains, Ba PTA84, Ba PTA85, and Bs PTA86.

[0565] TABLE 55 presents genes for putative genes encoding for antimicrobial resistance (AMR). Ba PTA84 and 85 had a similar set of putative AMR genes identified, namely putative genes encoding methyl transferase (cfr/cfr-like,clbA) (24), tetracyclin efflux protein (tet(L)) (25), Streptothricin-N-acetyltransferase (satA), and rifamycin-inactivating phosphotransferase (rphC) (27, 28). Bs PTA86 genome carried putative genes that encoded macrolide 2′phosphotransferase (mphK), ABC-F type ribosomal protection protein (vm1R), Streptothricin-N-acetyltransferase (satA), tetracyclin efflux protein (tet(L)), aminoglycoside 6-adenylyltransferase (aadK) (29), and rifamycin-inactivating phosphotransferase (rphC). The aadK gene from B. subtilis was originally found in susceptible derivatives of Marburg 168 strains. Heterologous expression of the gene in a plasmid in E. coli resulted in resistance phenotype toward rifamycin suggesting the need for high gene copies to confer resistance (30).

TABLE 55
Putative antimicrobial resistance genes identified through genome analysis

| | | | | | Accession | |
|---|---|---|---|---|---|---|
| Bacillus strain | Gene product | Gene id | % Coverage | % Identity | number | Antibiotic Resistance |
| B. | 23S rRNA | clbA | 100 | 96.86 | NG_062350.1 | Lincosamide; Macrolide; Streptogramin |
| amyloliquefaciens | (adenine(2503)- | | | | | |
| PTA-84 | C(8))- | | | | | |
| | methyltransferase | | | | | |
| | ClbA | | | | | |
| | tetracycline efflux | tet(L) | 100 | 86.64 | NG_048204.1 | Tetracycline |
| | MFS transporter | | | | | |
| | Tet(L) | | | | | |
| | streptothricin N- | satA_Bs | 100 | 85.63 | NG_064662.1 | Streptothricin |
| | acetyltransferase | | | | | |
| | SatA | | | | | |
| | rifamycin- | rphC | 99.31 | 80.41 | NG_063825.1 | Rifamycin |
| | inactivating | | | | | |
| | phosphotransferase | | | | | |
| | RphC | | | | | |
| | cfr(B) | cfr(B)_3 | 98.67 | 87.74 | KR610408 | Chloramphenicol; Florfenicol; |
| | | | | | | Clindamycin; Lincomycin; Linezolid; |
| | | | | | | Dalfopristin; Pristinamycin_Iia; |
| | | | | | | Virginiamycin_M; Tiamulin |
| B. | streptothricin N- | satA_Bs | 100 | 85.63 | NG_064662.1 | Streptothricin |
| amyloliquefaciens | acetyltransferase | | | | | |
| PTA-85 | SatA | | | | | |
| | tetracycline efflux | tet(L) | 100 | 86.64 | NG_048204.1 | Tetracycline |
| | MFS transporter | | | | | |
| | Tet(L) | | | | | |
| | 23S rRNA | clbA | 100 | 96.86 | NG_062350.1 | Lincosamide; Macrolide; Streptogramin |
| | (adenine(2503)- | | | | | |
| | C(8))- | | | | | |
| | methyltransferase | | | | | |
| | ClbA | | | | | |
| | rifamycin- | rphC | 99.31 | 80.41 | NG_063825.1 | Rifamycin |
| | inactivating | | | | | |
| | phosphotransferase | | | | | |
| | RphC | | | | | |
| | cfr(B) | cfr(B)_3 | 98.67 | 87.74 | KR610408 | Chloramphenicol; Florfenicol; |
| | | | | | | Clindamycin; Lincomycin; Linezolid; |
| | | | | | | Dalfopristin; Pristinamycin_Iia; |
| | | | | | | Virginiamycin_M; Tiamulin |
| B. subtilis | macrolide 2′- | mphK | 100 | 97.72 | NG_065846.1 | Macrolide |
| PTA-86 | phosphotransferase | | | | | |
| | MphK | | | | | |
| | ABC-F type | vmlR | 100 | 98.66 | NG_063831.1 | Lincosamide; Streptogramin; Tiamulin |
| | ribosomal | | | | | |
| | protection protein | | | | | |
| | VmlR | | | | | |
| | streptothricin N- | satA_Bs | 100 | 95.78 | NG_064662.1 | Streptothricin |
| | acetyltransferase | | | | | |
| | SatA | | | | | |
| | tetracycline efflux | tet(L) | 100 | 100 | NG_048204.1 | Tetracycline |
| | MFS transporter | | | | | |
| | Tet(L) | | | | | |
| | aminoglycoside 6- | aadK | 99.77 | 98.12 | NG_047379.1 | Streptomycin |
| | adenylyltransferase | | | | | |
| | AadK | | | | | |
| | rifamycin- | rphC | 99.39 | 82.18 | NG_063825.1 | Rifamycin |
| | inactivating | | | | | |
| | phosphotransferase | | | | | |
| | RphC | | | | | |

[0566] Antioxidants, Adhesion, and Folate Biosynthesis

[0567] Genes encoding primary redox enzymes such as superoxide dismutase and catalase that scavenge reactive oxygen species were found in the three Bacillus genomes, TABLE 56. A thioredoxin system and genes for bacillithiol biosynthesis were also identified. All three genomes encoded for a thioredoxin reductase (locus tag for Ba PTA84, Ba PTA85, and Bs PTA86: JS608_03853, JTE87_00428, and JS609_03503 (BSUB105_03585), respectively) and two cognate thioredoxins for Ba PTA84 and Ba PTA85 (locus tags, JS608_02520 and JTE87_01059; JS609_02844 (BSUB105_02910) and JS608_03225) and a Trx for Bs PTA86 (locus tag, JTE87_01767). Thioredoxin systems maintain cellular redox homeostasis (62). Interestingly, despite lacking glutathione-glutaredoxin system, several genes for glutathione transport were found suggesting the potential transport of redox proteins, possibly bacillithiol, to the extracellular environment maintaining redox potential of the surroundings. Two genes for bacillithiol biosynthesis (63), bshA and B, were identified in genomes of Ba PTA84 and PTA85, and Bs PTA86, TABLE 56.

TABLE 56
Putative genes encoding antioxidant in the genomes of three Bacillus strains

| | | B. | B. | |
|---|---|---|---|---|
| | | amyloliquefaciens | amyloliquefaciens | B. subtilis |
| Description | Gene id | PTA-84 | PTA-85 | PTA-86 |
| Superoxide dismutase [Mn] | sodA | JS608_02998 | JTE87_01284 | JS609_02456 |
| Superoxide dismutase-like | yojM | JS608_02374 | JTE87_01913 | JS609_02066 |
| protein | | | | |
| Thiol peroxidase | tpx | JS608_03312 | JTE87_00971 | JS609_02946 |
| Thiol-disulfide | resA_1 | JS608_02246 | JTE87_01493 | JS609_01902 |
| oxidoreductase | | JS608_02790 | JTE87_02043 | JS609_02262 |
| Thiol-disulfide | ykuV | JS608_01870 | JTE87_02417 | JS609_01508 |
| oxidoreductase YkuV | | | | |
| Thioredoxin | trxA_1 | JS608_02520 | JTE87_01059 | JS609_02844 |
| | trxA_2 | JS608_03225 | JTE87_01767 | NA |
| Thioredoxin reductase | trxB | JS608_03853 | JTE87_00428 | JS609_03503 |
| Thioredoxin-like protein | ydbP | JS608_00883 | JTE87_03401 | JS609_00507 |
| YdbP | | | | |
| Thioredoxin-like protein YtpP | ytpP | JS608_03357 | JTE87_00926 | JS609_02981 |
| Catalase | katA_1 | JS608_00191 | JTE87_00040 | JS609_03916 |
| Catalase HPII | katE | JS608_00215 | JTE87_00016 | JS609_03957 |
| | katE_2 | NA | JTE87_04071 | NA |
| Putative | efeN | JS608_00150 | JTE87_00081 | JS609_03875 |
| deferrochelatase/peroxidase | | | | |
| EfeN | | | | |
| Sporulation thiol-disulfide | stoA | JS608_01832 | JTE87_02455 | JS609_01470 |
| oxidoreductase A | | | | |
| | ggt | NA | NA | NA |
| Glutathione hydrolase | ggt_2 | JS608_02314 | NA | JS609_01947 |
| proenzyme | | | | |
| Glutathione hydrolase-like | ywrD | JS608_03981 | JTE87_00299 | JS609_03652 |
| YwrD proenzyme | | | | |
| Glutathione transport system | gsiC | NA | NA | JS609_01195 |
| permease protein GsiC | | | | |
| Glutathione transport system | gsiD | JS608_01344 | JTE87_02945 | NA |
| permease protein GsiD | | | | |
| Glutathione-independent | fdhA | JS608_00753 | JTE87_03531 | JS609_04068 |
| formaldehyde dehydrogenase | | | | |
| Glutathione-regulated | kefB | JS608_01608 | JTE87_02677 | JS609_01222 |
| potassium-efflux system | | | | |
| protein KefB | | | | |
| Putative peroxiredoxin bcp | bcp | JS608_01314 | JTE87_02974 | JS609_00912 |
| Bacillithiol biosynthesis gene | BshA | JS608_02670 | JTE87_01529 | JS609_02141 |
| | BshB | JS608_02671 | JTE87_01528 | JS609_02142 |
| | | JS608_02672 | JTE87_00504 | JS609_02023 |
| Free methionine-R-sulfoxide | msrC | JS608_03327 | JTE87_00956 | JS609_02961 |
| reductase | | | | |
| Peptide methionine sulfoxide | msrA | JS608_02454 | JTE87_01833 | JS609_02115 |
| reductase MsrA | | | | |
| Peptide methionine sulfoxide | msrB | JS608_02453 | JTE87_01834 | JS609_02114 |
| reductase MsrB | | | | |

[0568] One of the key desirable traits in a probiotic candidate is the ability to adhere to epithelial cells. The two genes identified in all three strains putatively encode proteins involved in adhesion to mucus, epithelial cells and are known to be involved in host immunomodulation and unwanted microorganism aggregation, providing stability to the strains and the ability to compete with other undesirable resident gut bacteria, thereby enabling effective colonization of the gut and exclusion of pathogens (64, 65). Two genes each encoding for elongation factor Tu and 60 kDa chaperonin involved in adhesion of Bacillus species to intestinal epithelium were identified in all three genomes.

[0569] Probiotic bacteria confer several health benefits to the host, including vitamin production. We searched for key components of folate production pathways in Bacillus strains using the Enzyme Commission (EC) numbers associated with folate biosynthetic pathway. The analysis of genome sequences of Bacillus strains identified genes involved para-aminobenzoic acid (PABA) synthesis in all three strains (TABLE 57). However, strain Ba PTA84 has a frameshift mutation in pabB gene. The enzymes necessary for chorismate conversion into PABA are present in all three Bacillus probiotic strains. Bacillus probiotic strains also contain the genes of DHPPP de novo biosynthetic pathway. Previous studies have shown that B. subtilis genome harbor all the pathways components and have been engineered for folate production (66-68).

TABLE 57
Genes Involved in Folate Biosynthetic Pathway in Probiotic Bacillus spp.

| | | EC | | | |
|---|---|---|---|---|---|
| Annotation | Gene | Number | PTA-84 | PTA-85 | PTA-86 |
| Protein AroA(G) | aroA | 5.4.99.5 | JS608_03349 | JTE87_00934 | JS609_02973 |
| 3-phosphoshikimate 1- | aroA1 | 2.5.1.19 | JS608_02738 | JTE87_01546 | JS609_02206 |
| carboxyvinyltransferase 1 | | | | | |
| 3-dehydroquinate synthase | aroB | 4.2.3.4 | JS608_02748 | JTE87_01536 | JS609_02216 |
| Chorismate synthase | aroC | 4.2.3.5 | JS608_02749 | JTE87_01535 | JS609_02217 |
| 3-dehydroquinate dehydratase | aroD | 4.2.1.10 | JS608_01242 | JTE87_03044 | JS609_02255 |
| Shikimate dehydrogenase | aroE | 1.1.1.25 | — | — | JS609_02520 |
| (NADP(+)) | | | | | |
| Shikimate dehydrogenase | aroE_1 | 1.1.1.25 | JS608_01241 | JTE87_01221 | — |
| (NADP(+)) | | | | | |
| Shikimate | aroE_2 | 1.1.1.25 | JS608_03061 | JTE87_03045 | — |
| dehydrogenase | | | | | |
| (NADP(+)) | | | | | |
| Chorismate mutase AroH | aroH | 5.4.99.5 | JS608_02747 | JTE87_01537 | JS609_02215 |
| Shikimate kinase | aroK | 2.7.1.71 | JS608_00741 | JTE87_03543 | JS609_00356 |
| Aromatic amino acid | aroP | — | — | — | JS609_00352 |
| transport protein AroP | | | | | |
| Dihydroneopterin aldolase | folB | 4.1.2.25 | JS608_00496 | JTE87_03790 | JS609_00092 |
| Bifunctional protein FolD protein | folD | 1.5.1.5 | JS608_02930 | JTE87_01353 | JS609_02382 |
| GTP cyclohydrolase 1 | folE | 3.5.4.16 | JS608_02756 | JTE87_01528 | JS609_02224 |
| GTP cyclohydrolase FolE2 | folE2 | 3.5.4.16 | — | — | JS609_00375 |
| 2-amino-4-hydroxy-6- | | | | | |
| hydroxymethyldihydropterid | folK | 2.7.6.3 | JS608_00497 | JTE87_03789 | JS609_00093 |
| ine pyrophosphokinase | | | | | |
| Dihydropteroate synthase | folP | 2.5.1.15 | JS608_00495 | JTE87_03792 | JS609_00091 |
| Dihydropteroate synthase | folP1 | 2.5.1.15 | — | JTE87_03791 | — |
| Aminodeoxychorismate/anthranilate | pabA | 2.6.1.85 | JS608_00493 | JTE87_03794 | JS609_00089 |
| synthase component 2 | | | | | |
| Aminodeoxychorismate | pabB | 2.6.1.85 | JS608_00492* | JTE87_03795 | JS609_00088 |
| synthase component 1 | | | | | |
| Alkaline phosphatase D | phoD | 3.1.3.1 | JS608_00693 | JTE87_03591 | JS609_00303 |
| Alkaline phosphatase 3 | phoB | 3.1.3.2 | — | — | JS609_00619 |
| Alkaline phosphatase 4 | phoA | 3.1.3.3 | JS608_01407 | JTE87_02880 | JS609_01001 |
| Dihydrofolate reductase type 3 | dhfrIII | 1.5.1.3 | JS608_02513 | JTE87_01774 | — |

[0570] Screening for Prophages, Insertion Sequences and Transposases

[0571] All three strains were scanned for presence of mobile genetic elements such as prophages, insertion sequences (IS) and transposases. Ba PTA84 and Ba PTA85 have 3 transposases while BsPTA86 has 4 transposases. Ba PTA84, Ba PTA85 and Bs PTA86 share 2 copies of IS21 insertion sequence.

[0572] Effects of In-Feed Administration of Ba PTA84 on Growth Performance of Broiler Chickens

[0573] As a proof of principle, Ba PTA84 was selected in an in-vivo pilot study as a direct fed microbial to evaluate its probiotic efficacy in supporting improved broiler growth performance. To accomplish this, 2,500 one-day old broiler chickens (Cobb 500) were randomly assigned to 50 pens of 50 birds each and split between two treatment groups; an untreated Control group and a group receiving 1.5×105 CFU of Ba PTA84 per gram of feed for the full 42-day production period. Despite similar feed intake, birds fed the DFM had 3.5% higher final body weight compared to the control (2.16 vs. 2.23 kg for Control and DFM, respectively; p=0.0018). This translated to a 3.3% improvement in feed conversion ratio (FCR) for the DFM-fed group compared to Control (1.50 vs. 1.45 for Control and DFM, respectively; p=0.011) and a 6.2% increase in the European Broiler Index (EBI), a metric of overall production efficiency (337 vs. 358 for Control and DFM, respectively; p<0.0001), FIG. 44. These results indicated that use of Ba PTA84 as a DFM can significantly improve weight gain and feed efficiency in broiler chickens.

[0574] Cecal Microbiome Structure Analysis from Chicken with and without in-Feed Administration of Ba PTA84

[0575] To gather insights into the in-vivo effects of in-feed administration of B. amyloliquefaciens on broiler chickens, we analyzed the cecal microbiomes of 20 animals in the control and treatment groups of our clinical study. Samples from 42-day old animals were used to build 16S rRNA amplicon libraries for sequencing. The median coverage was −36,000 read pairs per sample, and 1,945 amplicon sequence variants (ASVs) were identified across samples.

[0576] Samples in the control and treatment groups showed similar values for ASV richness and diversity (FIGS. 45A and 45B, p-values=0.07, 0.44-0.36, respectively). Additionally, ANOSIM and PERMANOVA analyses based on the Bray-Curtis dissimilarity between samples did not support significant differences in community structures between treatment groups (ANOSIM p-value=0.66. PERMANOVA p-value=0.44). These results, which are evident by the lack of clustering of samples by treatment following principal components analysis (FIG. 45C), indicate that supplementation of Ba PTA84 at a dose sufficient to induce a positive effect on performance (FIG. 45) had minor effects on the diversity and structure of the cecal microbiome.

[0577] Discussion

[0578] A clear understanding of the physiology and safety of probiotic strains as well as their interactions with target host, and hosts' gut microbiota are essential to rationally develop the next generation of probiotics with improved safety and efficacy, and increased reproducibility. Here, we employed comprehensive multi-omics, biochemical, and microbiological approaches for the selection and characterization of Bacillus spp. strains to improve growth performance in poultry. Our data showed that the selected strain Ba PTA84 significantly improved growth performance indicating that the screening workflow helped to rationally design promising DFM candidates. Moreover, we generated information we expect will guide future efforts to decipher the gene clusters, metabolites, phenotypic traits, and microbiome impact of spore-formers as important characteristics of probiotic strains.

[0579] Bacillus spp. isolates were screened for their activities to inhibit poultry pathogens and ability to secrete digestive enzymes in-vitro. The best candidates were further selected based on their safety profiles (i.e. antimicrobial resistance profile and cytotoxicity level). Genomic and metabolomic analyses were performed on the select isolates to further investigate potential host-benefit properties and possible health/safety concerns. The top candidate was then tested for its effects on growth promotion in-vivo. This bottom-up approach ensures selection of the best candidates at each screening step. Strains that did not meet safety criteria were not selected. Only the best candidates that met phenotypic selection criteria moved forward to the next screening step. Genomic analysis of the top three Bacillus strains helped to create a link between phenotypic observations with genomic traits. Furthermore, genomic and metabolomic analyses of three candidate strains pointed to potential outcome differences when combining these three candidate strains in a consortium. Details from our findings are described below.

[0580] Host-adapted Bacillus strains. We expected that host-adapted Bacillus strains to exert better probiotic effects in the host environment than those isolated from other sources, thus, we targeted our isolation to those Bacillus spp. from animal GIT content or fecal samples of healthy animals (8). A higher diversity of isolates was obtained from the ethanol-treated samples compared to heat-treated samples, as reported previously (8, 22). Despite the general heat resistance feature of Bacillus spores, spore core, cortex, coat, and membrane composition determines the degree of the spores' heat resistance (10, 69, 70) resulting in different responses of spores toward heat stresses.

[0581] Desirable probiotic properties. With the continuing reduction in use of antibiotics in poultry farms, as driven by regulations, and some customer preferences, the development of microbial feed additives that support maintenance of poultry health in the face of undesirable organisms would be beneficial. Our screening results showed that Bacillus spp. controlled the growth of undesirable E. coli O2, O18, and O78, C. perfringens—and Salmonella Typhimurium. APEC strains cause collibacillosis, which is a major problem in commercial production (74, 75). Collibacillosis occurs when APEC originating from fecal materials translocate into the lung epithelium during fecal aerosolization. Thus, reducing the APEC load in feces as a potential effect of Bacillus spp. in the feed could help reduce the incidence of collibacillosis (76, 77). C. perfringens is a pathogen that causes necrotic enteritis in poultry (78) by the production of alpha oxin and NetB (79, 80). Necrotic enteritis is a multi-factorial disease that cost poultry farmers 6 billion dollar annually (81). Salmonella Typhimurium, a poultry gut commensal, is the major cause of salmonellosis in humans. This infection is facilitated by the consumption of Salmonella-containing poultry products (82, 83). The ability of Bacillus spp to supress growth of these undesirable organisms might be due to the production of AMPs (bacteriocins). Genome analysis of Ba PTA84, BaPTA85, and BsPTA86 suggested that the genomes encoded distinct AMPs (TABLE 53).

[0582] Bacillus species are known to secrete host beneficial enzymes such cellulase, xylanase, amylase, protease, β-mannanase, phytase (23, 51, 84). These enzymes, when fed to animals, improve digestion of low-calorie diets or reduce intestinal inflammation by breaking down non-starch polysaccharides (NSPs). Some NSPs are anti-nutritional factors, and increase the gut content viscosity, slow down feed retention time in the gut, and thus reduce nutrient absorption (85). An accumulation of undigested NSPs can lead to the growth of pathogens that cause subclinical infection challenges (86, 87). Production of pro-inflammatory cytokines as a response to NSPs demands a significant amount of energy, which otherwise could be preserved for growth, lowering food efficiency and growth performance (reviewed in (88)). Ba and Bs showed comparable protease, amylase, and β-mannanase activities. These activities were supported by our genomic analysis showing that Ba and Bs possess genes encoding for amylase, protease, β-mannanase, and phytase. Bs PTA86 genome contained more genes for enzymes compared to those of Ba PTA84 and PTA 85.

[0583] It is noteworthy that genome analyses revealed other potential benefits the three Bacillus candidates for animals. Genes encoding a wide array of antioxidant proteins were identified, superoxide dismutase, catalase, thioredoxin, and methionine sulfoxide, and bacillithiol. These proteins when expressed and secreted in the GIT could provide protection toward oxidative stress (89-91). Oxidative stress occurs in the GIT when the level of free radicals generated by reactive oxygen/nitrogen species (RO/NS) is much higher than the level of antioxidant proteins for neutralization of these toxic compounds (57). This event is triggered by various factors including nutritional or environmental heat stress, or pathological factors which ultimately decrease growth performance and quality of meat and eggs (57).

[0584] Among proposed functions of probiotic bacteria are the reduction of potential pathogenic bacteria, immune modulation, removal of harmful metabolites in the intestine and/or providing bioactive or otherwise regulatory metabolites. Folate-producing probiotic bacteria enable better nutrient digestion and energy recovery. Folate-producing probiotic strains could potentially confer protection against cancer, inflammation, stress, and digestive disturbances (66, 92-95). Several studies exploring the commercial utility of probiotic strains for folate production have been reported (92, 96, 97). Genes encoding essential enzymes in the biosynthetic pathways of folate were also found in the genome of three Bacillus strains. The products of these pathways supply important cofactors which once secreted would be absorbed by the host improving health status ((92, 96, 97).

[0585] Safety profiles. In addition, Bacillus DFM candidates must have acceptable safety profiles as expected by regulatory authorities. Some Bacillus spp. are known to produce AMPs and enterotoxins that might exert deleterious effects on the host cells (25). Lack of detailed characterizations of probiotic strains resulted in the use of B. cereus (Bactisubtil, Biosubtyl, and Subtyl) probiotic strains harboring structural genes of known enterotoxins (99). Cytotoxicity assessment of our Bacillus spp. strains suggested that Bacillus spp. did not cause cytotoxicity of Vero cells. Moreover, genome analysis of Ba PTA84, Ba PTA85, and Bs PTA 86 suggested that enterotoxins and other known virulence factors were absent in the subject Bacillus spp. Another important safety criterion is that Bacillus DFM genomes must be devoid of transferable antimicrobial resistance genotypes (100). The data suggested that almost all of the tested Bacillus isolates were sensitive to the antimicrobials tested and the apparent MIC values were below the recommended cut-off values. Genomic analysis of three Bacillus spp. identified putative genes for antimicrobial resistance to tetracycline, lincosamide, and strepthrothricine. In the genome of Bs PTA86, putative genes conferring resistance to rifampicin and macrolides were found. However, these genes have been reported present in Ba and Bs isolates from the environment (101, 102), suggesting these genes may be intrinsic properties of Ba and Bs strains. Furthermore, transferable mobile genetic elements such as transposons, insertion sequences were absent in the proximity of these genes indicating the very low risk of these genes being horizontally transferred to other gut microbes pose little to no risk to public health safety.

[0586] Metabolomic analysis. Probiotic strains are also known to secrete beneficial metabolites as microbial fermentation by-products such as short chain fatty acids (SCFAs) that help with mucus secretion, mucosal epithelial integrity, immune cell regulation, and serve as energy sources for colonocytes (103, 104). To investigate the potential host beneficial metabolites secreted by the three Bacillus strains, we performed global untargeted metabolomic analyses of Ba PTA84 and PTA85, and Bs PTA86. A metabolite of particular interest was 1-kestose that was identified in the culture supernatants of all strains. 1-Kestose, the smallest fructooligosaccharide (FOS), is a trisaccharide molecule composed of a glucose and two fructose residues linked by glycosidic bonds. Kestose is a prebiotic that, when consumed, enriches the growth of gut commensals such as Bifidobacteria, Lactobacillus, and Faecalibacterium prausnitzii promoting gut health (105). Of the three strains, Ba PTA84 produced the highest amount of 1-kestose. Thioproline, an antioxidant molecule, was identified in the culture supernatant of Ba PTA84 and Bs PTA86. Thioproline was reported to inhibit carcinogenesis in humans, and is expected to act as a nitrite scavenger (106). Pantothenate (Vitamin B5) and pyridoxine (Vitamin B6) were found in the culture supernatants of Ba PTA85 and Bs PTA86, respectively. Betaine and choline were possibly secreted by Bs PTA86. These molecules are methyl donors required for the biosynthesis of acetylcholine and phosphatidylcholine, for neural transmission and cell membrane integrity, respectively (107). Betaine, when supplemented in feed, has shown improved growth performance of birds during heat stresses (108, 109). Inclusion of choline has been associated with reduced FCR in broiler chickens (110).

[0587] Genomic analysis of Ba PTA84, PTA85, and Bs PTA86 suggested that these three strains harbor genes with complimentary activities (i.e., AMPs and enzymes). Thus, we hypothesize that inclusion of these three strains in a consortium would exert a greater benefit to the animal than that of any single strain. It is noteworthy that the subject Bacillus spp. generated more unique metabolites when grown in consortia of two or three Bacillus strains, suggesting that a combination of strains would generate distinct outcomes compared to that of single isolate. Indoleacetate was detected only in the culture supernatant of consortia of Ba PTA84-Ba PTA85, and Ba PTA84-Ba PTA85-Bs PTA86, but not in the individual strains. Indolacetate is an intermediate of microbial tryptophan biosynthesis that serves as a ligand for aryl hydrocarbon receptors (AhRs) enhances intestinal integrity and modulates host immune systems by exerting anti-inflammatory activities (32, 33). A higher abundance of tryptophan metabolites was also observed in animals treated with sub-therapeutic level of antibiotic Bacitracin Methylene Disalicylate (BMD) (34).

[0588] Feed inclusion of Ba PTA84 supported improved poultry growth performance. An in-vivo efficacy study employing daily feed inclusion of Ba PTA84 resulted in significantly improved overall growth performance of broiler chickens as shown by a significant increase of average daily gain, production efficiency, and a reduction in feed conversion ratio. To better understand the mechanism of action underlying the effect of Ba PTA84 supplementation on animal health, we investigated the effects of supplementation of Ba PTA84 on the modulation of intestinal microbiota. The chicken gut microbiota plays prominent roles in bioavailability of nutrients, immune system development, intestinal integrity, and exclusion of unwanted microorganisms (111). Growth promotion effects of probiotics have been linked to changes in cecal microbiome structure and function (18), (112). Interestingly, microbiome taxonomic profiling analyses of cecal contents from a control group and that with dietary supplement of Ba PTA84 suggested no significant differences between the cecal microbiome structures of the two groups according to both alpha and β-diversity parameters. Thus, it is likely that Ba PTA84 supports growth performance without altering the normal cecum microbiome. It is still possible that microbial communities in other organs are affected by supplementation of this strain. It is noteworthy that metabolomic analysis of culture supernatant of Ba PTA84 showed that it had a potential to produce 1-kestose, a microbiome modulator (105). In the future, it would be interesting to test whether 1-kestose is indeed produced in vivo.

[0589] With the advances of sequencing technologies allowing analysis of large number of samples at relatively low cost, it is possible to use genomic analysis as an initial high-throughput screening step to eliminate candidate strains harboring genes that might have negative impacts to the animal or to public health, and investigate the impact of individual genes and molecules on the observed clinical outcomes.

### REFERENCES

[0590] 1. FAO-UN (2018) The future of food and agriculture, Alternative pathways to 2050. in Supplementar Material (Food and Agriculture Organization of the United Nations).
[0591] 2. US-FDA (2013) New animal drugs and new animal drug combination products administered in or on medicated feed or drinking water of food-producing animals: recommendations for drug sponsors for voluntarily aligning product use conditions with GFI #209. (Department of Health and Human Services).
[0592] 3. EFSA Panel on Biological Hazards (BIOHAZ) et al. (2020) Update of the list of QPS-recommended biological agents intentionally added to food or feed as notified to EFSA 13: suitability of taxonomic units notified to EFSA until September 2020.
[0593] 4. P. R. Moore, Evenson, A., Luckey, T. D., McCoy, E., Elvehjem, C. A. Hart, E. B., Use of sulfasuxidine, streptothricin, and streptomycin in nutritional studies with the chick. Journal of Biological Chemistry 2, 437-441 (1946).

[0594] C. Hill et al., The International Scientific Association for Probiotics and Prebiotics consensus statement on the scope and appropriate use of the term probiotic. Nature Reviews Gastroenterology & Hepatology 11, 506-514 (2014).
[0595] 6. R. Jha, R. Das, S. Oak, P. Mishra, Probiotics (Direct-Fed Microbials) in Poultry Nutrition and Their Effects on Nutrient Utilization, Growth and Laying Performance, and Gut Health: A Systematic Review. Animals (Basel) 10 (2020).
[0596] 7. A. Grant, C. G. Gay, H. S. Lillehoj, Bacillus spp. as direct-fed microbial antibiotic alternatives to enhance growth, immunity, and gut health in poultry. Avian Pathol 47, 339-351 (2018).
[0597] 8. T. M. Barbosa, C. R. Serra, R. M. La Ragione, M. J. Woodward, A. O. Henriques, Screening for Bacillus isolates in the broiler gastrointestinal tract. Appl Environ Microbiol 71, 968-978 (2005).
[0598] 9. X. Guo, D. Li, W. Lu, X. Piao, X. Chen, Screening of Bacillus strains as potential probiotics and subsequent confirmation of the in vivo effectiveness of Bacillus subtilis MA139 in pigs. Antonie Van Leeuwenhoek 90, 139-146 (2006).
[0599] 10. P. Setlow, Spores of Bacillus subtilis: their resistance to and killing by radiation, heat and chemicals. Journal of Applied Microbiology 101, 514-525 (2006).
[0600] 11. S. Shivaramaiah et al., Evaluation of Bacillus species as potential candidates for direct-fed microbials in commercial poultry. Poult Sci 90, 1574-1580 (2011).
[0601] 12. M. Bernardeau, M. J. Lehtinen, S. D. Forssten, P. Nurminen, Importance of the gastrointestinal life cycle of Bacillus for probiotic functionality. J Food Sci Technol 54, 2570-2584 (2017).
[0602] 13. J. D. Latorre et al., Evaluation of germination, distribution, and persistence of Bacillus subtilis spores through the gastrointestinal tract of chickens. Poult Sci 93, 1793-1800 (2014).
[0603] 14. T. T. Hoa et al., Fate and dissemination of Bacillus subtilis spores in a murine model. Applied and environmental microbiology 67, 3819-3823 (2001).
[0604] 15. G. Casula, S. M. Cutting, Bacillus probiotics: spore germination in the gastrointestinal tract. Applied and environmental microbiology 68, 2344-2352 (2002).
[0605] 16. S. Mingmongkolchai, W. Panbangred, Bacillus probiotics: an alternative to antibiotics for livestock production. J Appl Microbiol 124, 1334-1346 (2018). 17. A. Q. Grant, C. G. Gay, H. S. Lillehoj, Bacillus spp. as direct-fed microbial antibiotic alternatives to enhance growth, immunity, and gut health in poultry. Avian Pathology 47, 339-351 (2018).
[0606] 18. Y. Ma et al., Supplemental Bacillus subtilis DSM 32315 manipulates intestinal structure and microbial composition in broiler chickens. Sci Rep 8, 15358 (2018).
[0607] 19. J. S. Weese, H. Martin, Assessment of commercial probiotic bacterial contents and label accuracy. Can Vet J 52, 43-46 (2011).
[0608] 20. J. S. Weese, Microbiologic evaluation of commercial probiotics. J Am Vet Med Assoc 220, 794-797 (2002).
[0609] 21. D. H. Green et al., Characterization of two Bacillus probiotics. Appl Environ Microbiol 65, 4288-4291 (1999).
[0610] 22. J. R. Koransky, S. D. Allen, V. R. Dowell, Use of ethanol for selective isolation of sporeforming microorganisms. Applied and Environmental Microbiology 35, 762-765 (1978).
[0611] 23. J. D. Latorre et al., Evaluation and Selection of Bacillus Species Based on Enzyme Production, Antimicrobial Activity, and Biofilm Synthesis as Direct-Fed Microbial Candidates for Poultry. Front Vet Sci 3, 95 (2016).
[0612] 24. B. V. McCleary, A simple assay procedure for β-d-mannanase. Carbohydrate Research 67, 213-221 (1978).
[0613] 25. G. R. EFSA Panel on Additives and Products or Substances used in Animal Feed (FEEDAP), Gabriele Aquilina, Giovanna Azimonti, Vasileios Bampidis, Maria de Lourdes Bastos, Georges Bodes, Andrew Chesson, Pier Sandro Cocconcelli, Gerhard Flachowsky, Jurgen Gropp, Boris Kolar, Maryline Kouba, Marta Lopez-Alonso, Secundino Lopez Puente, Alberto Mantovani, Baltasar Mayo, Fernando Ramos, Maria Saarela, Roberto Edoardo Villa, Robert John Wallace, Pieter Wester, Boet Glandorf, Lieve Herman, Sirpa Karenlampi, Jaime Aguilera, Montserrat Anguita, Rosella Brozzi, Jaume Galobart (2018) Guidance on the characterisation of microorganisms used as feed additives or as production organisms. (EFSA (European Food Safety Authority)).
[0614] 26. G. L. S. f. a. H. World (2021) Performance Standards for Antimicrobial Susceptibility Testing. (CLSI), p 352.
[0615] 27. J. Rao et al., Tn2008-driven carbapenem resistance in Acinetobacter baumannii isolates from a period of increased incidence of infections in a Southwest Virginia hospital (USA). J Glob Antimicrob Resist 12, 79-87 (2018).
[0616] 28. D. Hyatt et al., Prodigal: prokaryotic gene recognition and translation initiation site identification. BMC Bioinformatics 11, 119 (2010).
[0617] 29. D. Laslett, B. Canback, ARAGORN, a program to detect tRNA genes and tmRNA genes in nucleotide sequences. Nucleic Acids Res 32, 11-16 (2004).
[0618] 30. T. Seemann, Prokka rapid prokaryotic genome annotation. Bioinformatics 30, 2068-2069 (2014).
[0619] 31. B. E. Suzek, M. D. Ermolaeva, M. Schreiber, S. L. Salzberg, A probabilistic method for identifying start codons in bacterial genomes. Bioinformatics 17, 1123-1130 (2001).
[0620] 32. C. L. Kingsford, K. Ayanbule, S. L. Salzberg, Rapid, accurate, computational discovery of Rho-independent transcription terminators illuminates their relationship to DNA uptake. Genome Biol 8, R22 (2007).
[0621] 33. E. P. Nawrocki, D. L. Kolbe, S. R. Eddy, Infernal 1.0: inference of RNA alignments. Bioinformatics 25, 1335-1337 (2009).
[0622] 34. B. Tjaden, A computational system for identifying operons based on RNA-seq data. Methods. 176, 62-70 (2020).
[0623] 35. A. Bremges, A. Fritz, A. C. McHardy, CAMITAX: Taxon labels for microbial genomes. GigaScience 9 (2020).
[0624] 36. D. M. Emms, S. Kelly, OrthoFinder: phylogenetic orthology inference for comparative genomics. Genome Biol 20, 238 (2019).
[0625] 37. E. W. Sayers et al., Database resources of the National Center for Biotechnology Information. Nucleic Acids Res 49, D10-d17 (2021).
[0626] 38. S. I. Na et al., UBCG: Up-to-date bacterial core gene set and pipeline for phylogenomic tree reconstruction. J Microbiol 56, 280-285 (2018).
[0627] 39. M. N. Price, P. S. Dehal, A. P. Arkin, FastTree 2—approximately maximum-likelihood trees for large alignments. PLoS One 5, e9490 (2010).
[0628] 40. Z. Xie, H. Tang, ISEScan: automated identification of insertion sequence elements in prokaryotic genomes. Bioinformatics 33, 3340-3347 (2017).
[0629] 41. S. Akhter, R. K. Aziz, R. A. Edwards, PhiSpy: a novel algorithm for finding prophages in bacterial genomes that combines similarity- and composition-based strategies. Nucleic Acids Res 40, e126 (2012).
[0630] 42. W. N. P. Setlow, Molecular Biological Methods for Bacillus. C. H. S. Cutting, Ed. (John Wiley, New York, 1990).
[0631] 43. M. Martin, Cutadapt removes adapter sequences from high-throughput sequencing reads. 2011 17, 3 (2011).
[0632] 44. B. J. Callahan et al., DADA2: High-resolution sample inference from Illumina amplicon data. Nat Methods 13, 581-583 (2016).
[0633] 45. P. Yilmaz et al., The SILVA and “All-species Living Tree Project (LTP)” taxonomic frameworks. Nucleic acids research 42, D643-D648 (2014).
[0634] 46. E. H. Simpson, Measurement of Diversity. Nature 163, 688-688 (1949).
[0635] 47. C. E. Shannon, The mathematical theory of communication. 1963. MD Comput 14, 306-317 (1997).
[0636] 48. A. Chao, Nonparametric Estimation of the Number of Classes in a Population. Scandinavian Journal of Statistics 11, 265-270 (1984).
[0637] 49. Anonymous (http://scikit-bio.org/.
[0638] 50. The Association of American Feed Control Officials, Inc., 2021 Official Publication (FASS Inc., Champaign, IL).
[0639] 51. I. Danilova, M. Sharipova, The Practical Potential of Bacilli and Their Enzymes for Industrial Production. Frontiers in Microbiology 11 (2020).
[0640] 52. F. J. Contesini, R. R. d. Melo, H. H. Sato, An overview of Bacillus proteases: from production to application. Critical Reviews in Biotechnology 38, 321-334 (2018).
[0641] 53. A. Fagerlund, T. Lindback, A. K. Storset, P. E. Granum, S. P. Hardy, Bacillus cereus Nhe is a pore-forming toxin with structural and functional properties similar to the ClyA (HlyE, SheA) family of haemolysins, able to induce osmotic lysis in epithelia. Microbiology (Reading) 154, 693-704 (2008).
[0642] 54. M. Saeed et al., The Role of B-Mannanase (Hemicell) in Improving Poultry Productivity, Health and Environment. Brazilian Journal of Poultry Science 21 (2019).
[0643] 55. H. Fayek, M. Abou El-Ella, M. Attia, Y. Mady (1995) Evaluation of using some feed additives in layer diets. in Sci. Conf. Anim Nutr, pp 313-321.
[0644] 56. Y. Zhou, Z. Jiang, D. Lv, T. Wang, Improved energy-utilizing efficiency by enzyme preparation supplement in broiler diets with different metabolizable energy levels. Poult Sci 88, 316-322 (2009).
[0645] 57. K. Sherif, Performance of broiler chicks fed plant protein diets supplemented with commercial enzymes. Journal of Animal and Poultry Production 34, 2819-2834 (2009).
[0646] 58. K. Babasaki, T. Takao, Y. Shimonishi, K. Kurahashi, Subtilosin A, a new antibiotic peptide produced by Bacillus subtilis 168: isolation, structural analysis, and biogenesis. J Biochem 98, 585-603 (1985).
[0647] 59. C. E. Shelburne et al., The spectrum of antimicrobial activity of the bacteriocin subtilosin A. Journal of Antimicrobial Chemotherapy 59, 297-300 (2007).
[0648] 60. T. Stein, S. Düsterhus, A. Stroh, K. D. Entian, Subtilosin production by two Bacillus subtilis subspecies and variance of the sbo-alb cluster. Appl Environ Microbiol 70, 2349-2353 (2004).
[0649] 61. E. F. S. A. (EFSA), EFSA statement on the requirements for whole genome sequence analysis of microorganisms intentionally used in the food chain. EFSA Journal, 1-15 (2021).
[0650] 62. Y. Meyer, B. B. Buchanan, F. Vignols, J.-P. Reichheld, Thioredoxins and Glutaredoxins: Unifying Elements in Redox Biology. Annual Review of Genetics 43, 335-367 (2009).
[0651] 63. A. Gaballa et al., Biosynthesis and functions of bacillithiol, a major low-molecular-weight thiol in Bacilli. Proc Natl Acad Sci USA 107, 6482-6486 (2010).
[0652] 64. H. Antelmann, C Scharf, M. Hecker, Phosphate starvation-inducible proteins of Bacillus subtilis: proteomics and transcriptional analysis. J Bacteriol 182, 4478-4490 (2000).
[0653] 65. B. Sánchez, P. Bressollier, M. C. Urdaci, Exported proteins in probiotic bacteria: adhesion to intestinal surfaces, host immunomodulation and molecular cross-talking with the host. FEMS Immunology & Medical Microbiology 54, 1-17 (2008).
[0654] 66. T. Zhu et al., Engineering of Bacillus subtilis for enhanced total synthesis of folic acid. Appl Environ Microbiol 71, 7122-7129 (2005).
[0655] 67. V. de Crecy-Lagard, Variations in metabolic pathways create challenges for automated metabolic reconstructions: Examples from the tetrahydrofolate synthesis pathway. Comput Struct Biotechnol J 10, 41-50 (2014).
[0656] 68. A. R. Salem, J. R. Pattison, M. A. Foster, Folic acid and the methylation of homocysteine by Bacillus subtilis. Biochem J 126, 993-1004 (1972).
[0657] 69. S. Brul et al., Challenges and advances in systems biology analysis of Bacillus spore physiology; molecular differences between an extreme heat resistant spore forming Bacillus subtilis food isolate and a laboratory strain. Food Microbiology 28, 221-227 (2011).
[0658] 70. E. M. Berendsen, M. H. Zwietering, O. P. Kuipers, M. H. J. Wells-Bennik, Two distinct groups within the Bacillus subtilis group display significantly different spore heat resistance properties. Food Microbiology 45, 18-25 (2015).
[0659] 71. F. Van Immersed, J. I. Rood, R. J. Moore, R. W. Titball, Rethinking our understanding of the pathogenesis of necrotic enteritis in chickens. Trends Microbiol 17, 32-36 (2009).
[0660] 72. K. Grave, M. C. Kaldhusdal, H. Kruse, L. M. Harr, K. Flatlandsmo, What has happened in norway after the ban of avoparcin? Consumption of antimicrobials by poultry. Prey Vet Med 62, 59-72 (2004).
[0661] 73. L. Hughes, P. Hermans, K. Morgan, Risk factors for the use of prescription antibiotics on UK broiler farms. J Antimicrob Chemother 61, 947-952 (2008).
[0662] 74. F. Dziva, M. P. Stevens, Colibacillosis in poultry: unravelling the molecular basis of virulence of avian pathogenic Escherichia coli in their natural hosts. Avian Pathol 37, 355-366 (2008).
[0663] 75. M. Mellata, Human and avian extraintestinal pathogenic Escherichia coli: infections, zoonotic risks, and antibiotic resistance trends. Foodborne Pathog Dis 10, 916-932 (2013).
[0664] 76. H. Duan et al., Transmission identification of Escherichia coli aerosol in chicken houses to their environments using ERIC-PCR. Sci China C Life Sci 51, 164-173 (2008).
[0665] 77. Y. C. Chien, C. J. Chen, T. H. Lin, S. H. Chen, Y. C. Chien, Characteristics of microbial aerosols released from chicken and swine feces. J Air Waste Manag Assoc 61, 882-889 (2011).
[0666] 78. K. K. Cooper, J. G. Songer, Necrotic enteritis in chickens: A paradigm of enteric infection by Clostridium perfringens type A. Anaerobe 15, 55-60 (2009).
[0667] 79. A. L. Keyburn et al., NetB, a new toxin that is associated with avian necrotic enteritis caused by Clostridium perfringens. PLoS Pathog 4, e26 (2008).
[0668] 80. A. L. Keyburn et al., Alpha-toxin of Clostridium perfringens is not an essential virulence factor in necrotic enteritis in chickens. Infect Immun 74, 6496-6500 (2006).
[0669] 81. B. Wade, A. Keyburn, The true cost of necrotic enteritis. World Poult 31, 16-17 (2015).
[0670] 82. M. B. Batz, S. Hoffmann, J. G. Morris, Jr., Ranking the disease burden of 14 pathogens in food sources in the United States using attribution data from outbreak investigations and expert elicitation. J Food Prot 75, 1278-1291 (2012).
[0671] 83. S. L. Foley, A. M. Lynne, Food animal-associated Salmonella challenges: pathogenicity and antimicrobial resistance. J Anim Sci 86, E173-187 (2008).84. S. Singh, B. K. Bajaj, Bioprocess optimization for production of thermoalkali-stable protease from Bacillus subtilis K-1 under solid-state fermentation. Preparative Biochemistry & Biotechnology 46, 717-724 (2016).
[0672] 85. A. Raza, S. Bashir, R. Tabassum, An update on carbohydrases: growth performance and intestinal health of poultry. Heliyon 5, e01437-e01437 (2019).
[0673] 86. M. Kaldhusdal, Necrotic enteritis as affected by dietary ingredients. World Poultry 16, 42-43 (2000).
[0674] 87. F. Van Immersed et al., Clostridium perfringens in poultry: an emerging threat for animal and public health. Avian Pathol 33, 537-549 (2004).
[0675] 88. G. Cardoso Dal Pont, M. Farnell, Y. Farnell, M. H. Kogut, Dietary Factors as Triggers of Low-Grade Chronic Intestinal Inflammation in Poultry. Microorganisms 8, 139 (2020).
[0676] 89. Y. Wang et al., Bacillus amyloliquefaciens SCO6 alleviates the oxidative stress of IPEC-1 via modulating Nrf2/Keapl signaling pathway and decreasing ROS production. Appl Microbiol Biotechnol 101, 3015-3026 (2017).
[0677] 90. A. Abudabos, A. Alyemni, H. Zakaria, Effect of Two Strains of Probiotics on the Antioxidant Capacity, Oxidative Stress, and Immune Responses of Salmonella-Challenged Broilers. Brazilian Journal of Poultry Science 18, 175-180 (2016).
[0678] 91. T. Inatomi, K. Otomaru, Effect of dietary probiotics on the semen traits and antioxidative activity of male broiler breeders. Scientific Reports 8, 5874 (2018).
[0679] 92. M. Rossi, A. Amaretti, S. Raimondi, Folate production by probiotic bacteria. Nutrients 3,118-134 (2011).
[0680] 93. J. Zhang et al., Screening of folate-producing lactic acid bacteria and modulatory effects of folate-biofortified yogurt on gut dysbacteriosis of folate-deficient rats. Food Funct 11, 6308-6318 (2020).
[0681] 94. C. S. Fuchs et al., The Influence of Folate and Multivitamin Use on the Familial Risk of Colon Cancer in Women. Cancer Epidemiology Biomarkers &amp; Prevention 11, 227-234 (2002).
[0682] 95. E. White, J. S. Shannon, R. E. Patterson, Relationship between vitamin and calcium supplement use and colon cancer. Cancer Epidemiol Biomarkers Prey 6, 769-774 (1997).
[0683] 96. M. Schallmey, A. Singh, 0. P. Ward, Developments in the use of Bacillus species for industrial production. Can J Microbiol 50, 1-17 (2004).
[0684] 97. U. Sauer, D. C. Cameron, J. E. Bailey, Metabolic capacity of Bacillus subtilis for the production of purine nucleosides, riboflavin, and folic acid. Biotechnology and Bioengineering 59, 227-238 (1998).
[0685] 98. F. M. Asrar, D. L. O'Connor, Bacterially synthesized folate and supplemental folic acid are absorbed across the large intestine of piglets. J Nutr Biochem 16, 587-593 (2005).
[0686] 99. L. H. Duc, H. A. Hong, T. M. Barbosa, A. O. Henriques, S. M. Cutting, Characterization of Bacillus probiotics available for human use. Applied and environmental microbiology 70, 2161-2171 (2004).
[0687] 100. V. Ciorba, A. Odone, L. Veronesi, C. Pasquarella, C. Signorelli, Antibiotic resistance as a major public health concern: epidemiology and economic impact. Ann Ig 27, 562-579 (2015).
[0688] 101. D. B. Adimpong et al., Antimicrobial susceptibility of Bacillus strains isolated from primary starters for African traditional bread production and characterization of the bacitracin operon and bacitracin biosynthesis. Appl Environ Microbiol 78, 7903-7914 (2012).
[0689] 102. R. W. Phelan et al., Tetracycline resistance-encoding plasmid from Bacillus sp. strain #24, isolated from the marine sponge Haliclona simulans. Appl Environ Microbiol 77, 327-329 (2011).
[0690] 103. L. R. Lopetuso, F. Scaldaferri, V. Petito, A. Gasbarrini, Commensal Clostridia: leading players in the maintenance of gut homeostasis. Gut pathogens 5, 1-8 (2013).
[0691] 104. H. M. Hamer et al., Review article: the role of butyrate on colonic function Aliment Pharmacol Ther 27, 104-119 (2008).
[0692] 105. J. A. Patterson, J. I. Orban, A. L. Sutton, G. N. Richards, Selective enrichment of Bifidobacteria in the intestinal tract of broilers by thermally produced kestoses and effect on broiler performance Poult Sci 76, 497-500 (1997).
[0693] 106. J. A. Patterson et al., Thioproline formation as a driver of formaldehyde toxicity in Escherichia coli. Biochem J 477, 1745-1757 (2020).
[0694] 107. R. R. Zempleni J, McCormick D B, Suttie J W, Handbook of vitamins. (CRC Press, Boca Raton (FL), ed. 4th, 2007).
[0695] 108. W. Liu et al., Effects of Dietary Betaine on Growth Performance, Digestive Function, Carcass Traits, and Meat Quality in Indigenous Yellow-Feathered Broilers under Long-Term Heat Stress. Animals (Basel) 9 (2019).
[0696] 109. S. He, S. Zhao, S. Dai, D. Liu, S. G. Bokhari, Effects of dietary betaine on growth performance, fat deposition and serum lipids in broilers subjected to chronic heat stress Anim Sci J 86, 897-903 (2015).
[0697] 110. G. S. Santiago et al., Dietary choline affects field performance and broiler leg deviations. Livestock Science 240, 104127 (2020).
[0698] 111. Y. Shang, S. Kumar, B. Oakley, W. K. Kim, Chicken Gut Microbiota: Importance and Detection Technology. Front Vet Sci 5, 254 (2018).
[0699] 112. A.-R. Al-Fataftah, A. Abdelqader, Effects of dietary Bacillus subtilis on heat-stressed broilers performance, intestinal morphology and microflora composition. Animal Feed Science and Technology 198, 279-285 (2014).
[0700] 113. J. D. Latorre et al., Evaluation and Selection of Bacillus Species Based on Enzyme Production, Antimicrobial Activity, and Biofilm Synthesis as Direct-Fed Microbial Candidates for Poultry. Front Vet Sci 3, 95 (2016).
[0701] 114. B. V. McCleary, A simple assay procedure for β-d-mannanase. Carbohydrate Research 67, 213-221 (1978).
[0702] 115. G. R. EFSA Panel on Additives and Products or Substances used in Animal Feed (FEEDAP), Gabriele Aquilina, Giovanna Azimonti, Vasileios Bampidis, Maria de Lourdes Bastos, Georges Bodes, Andrew Chesson, Pier Sandro Cocconcelli, Gerhard Flachowsky, Jurgen Gropp, Boris Kolar, Maryline Kouba, Marta Lopez-Alonso, Secundino Lopez Puente, Alberto Mantovani, Baltasar Mayo, Fernando Ramos, Maria Saarela, Roberto Edoardo Villa, Robert John Wallace, Pieter Wester, Boet Glandorf, Lieve Herman, Sirpa Karenlampi, Jaime Aguilera, Montserrat Anguita, Rosella Brozzi, Jaume Galobart (2018) Guidance on the characterisation of microorganisms used as feed additives or as production organisms. (EFSA (European Food Safety Authority)).

### Example 19

[0703] Bacillus strains 06 (BAMY006), 71 (BAMY071) and 105 (BSUB105; PTA-126786 or PTA-86) were analysed and compared and classes of genes or secondary metabolite pathways unique to each strain identified. Some results are provided in the earlier examples and tables, such as bacteriocin predictions, secondary metabolites, carbohydrate metabolizing enzymes. Unique proteins (predicted proteins in one strain for which an equivalent or homologous protein encoding gene is not identified by identity searches in the other two strains) are provided: TABLE 58—selected gene and corresponding protein sequences unique for Bacillus strain 06 (BAMY006); TABLE 59—selected protein sequences unique for Bacillus strain 71 (BAMY071); TABLE 60—selected gene protein sequences for Bacillus subtilis 105 (BSUB105; PTA-126786 or PTA-86). Strain 105 includes 4 subtilosin genes, pullulanase (which helps break down branched chain carbohydrates to simple carbohydrates), cyclodextrin-binding protein, 9 sporulation related genes, beta-galactosidase YesZ and GanA genes, oxidoreductase YjmC.

TABLE 58
Bacillus strain 06 (BAMY006) protein sequences

| Gene | Annotation | Sequence |
|---|---|---|
| BAMY06_ | SPheta | MNTAYRVWDGEQMHYWDDEGLSLTIKNNGDWTLKRLYTDVLVPVVDSTNRNAALMWGTGLKDKNEKMIY |
| 01888 | prophage- | EKDVIKFKSVYCENKIIKAVVKFRDSLGSFVFNRGDDQDFWRMDVSLSEIEVIGDIYQNPELLEGAE |
| | derived | (SEQ D NO: 263) |
| | uncharacterized | |
| | protein YopX | |
| BAMY06_ | Transcription | MKIAKVNNNNVVSVLKEGNQELVIMGRGIAFQKKTGDPADEARIEKVLTLDNKDVSEVQNPFV |
| 00183 | antiterminator | (SEQ D NO: 264) |
| | LicT | |
| BAMY06_ | Uric acid | MKNGYAKTLSLGIQHVLAMYAGAVVVPLIVGAALGLNAEQLTYLVSIDIFMCGAATLLQVWRNKCFGIG |
| 01794 | permease | LPVVLGCTFTAVAPIISIGKEYGISAIYGSILASGLLVILLSFFFGKLVSFFPPVVTGSVVRIID |
| | PucK | (SEQ D NO: 265) |
| BAMY06_ | DNA-directed | MKRKKDGLSKQVHIYSVDTSAFYNDKENSLHNKILKSYRYRDYLKTLDNVNNKHKKYISQRITYLKECL |
| 01845 | RNA polymerase | YSAFEEHNDIRTLRTDSLRDNKVISLFDSVLTRTLGIKENTLSEEIMVVQTYHFEVLKDIIDQGFLHNN |
| | YonO | EKYVYFTSSAGQIRTKKSCFIKKSTYDKYQDALTCGLSIEKINSLGGSSINKWNSYMALSNSASSPWEI |
| | | DIDKAIVVDDLETDVSSLVDYIDRDTYEITRKTMNIPIEHTDGCGMILPTLSSKSFMVRLPWVKGLLVP |
| | | FDFRKFAEENKAFKVTDIYGKEWDVVKDDVQIIFTKSQFKMWKYYSSWEEYQGNYKKYGCLGAKLNEED |
| | | PSVEGKLTYQMLQTLTDISGEELIQMSSKTVKEITTLGTDKETMLRVLGATEKKKHRTALQDALLLYPE |
| | | LLNDDHTKEIIKNKKKSMIKDAKSGKLLVDGARYTYLCPDLYAFCEKLFLNIQNPKGLLSGNDVHCSLY |
| | | DEGYIDILRSPHLFREHGVRWNKKDEKYEKWFITPGVYTSIHDPISKLLQFDNDGDKALIISDELIVNI |
| | | AKRNMENIVPLYYEMSVAQKQKINSRNIYEALTLAYGINIGEYSNNITKIWNSDNINLDVIKWLCMENN |
| | | FTIDFAKTLFMPTRPDHVDEKIKDYIKNKVPHFFINAKDKEEHSVELINESTVNKLDSIIPSDRINFAA |
| | | VAGKFDYRFLLKNRDIKLDDAIIREYKRLDQNKKWLMNDEDIKPGQKLYVYKVIKDRLLKIYNDEQSVA |
| | | DVLVKHLYKKKSKFKSTLWECFGDLILENMQNNLKRFKSCYSCGKMFKSISNKSKYCNKCALEIEKKNH |
| | | RLRQKKYSKKKMTK (SEQ D NO: 266) |
| BAMY06_ | Tubulin-like | MFGFIGVGQAGGSIADEAMKRGFHSVAINYSLSDLNSLINIQDKLHLVGTEGVGKDRSVAAKHMKNNWE |
| 01849 | protein | SSIEFIKNTMEKPSVQVIFVVFSAAGGTGSGVAPILLELLNECLTHKTIVAVPILPDNNEVLVNQMNTL |
| | CelZ | ELLDDLSMPETCVLPLDNQMVLSKYEGKISESRLYKETNKMFLDLIEVLLNYTDRGSKISTLDRKDLNQ |
| | | LFDTPGIMTIAQTDLNEFTIEGKYFDKLHEDIQKSWNNSIFTPVEFTNVMRAGVILDVHEFLTEHISYN |
| | | ELFNVFDNKMPLDLFKGHYDKGNRAITILSGLTWINERMKQLDDLIESGNTEVKETTVYKAKNRRREDL |
| | | FKPRKLENKESKKTSYMEALKRLKR (SEQ D NO: 267) |
| BAMY06_ | SPbeta | MNLKQMIKNECEKDNQLAAKLSKIAGYKKVNGFYKFINTPEKEMDNLGGLINIVKSLFPDNEEQLLSDY |
| 01874 | prophage- | FLSLDPNKKCARQSVEYSDINQWDTLTDKIVSRLSSSKNLASQEWGNIYSIHRRLSESKISLTDAIRAT |
| | derived | GKCKTDEMLFFSNAMLMYEYLKVGEFGLMKSTLSLLNFNDLPEGFVKDCYMNRISLLNANIYLNDNEIE |
| | uncharacterized | KSRYYSEQVIQNSNINRLKVFGHLTYGNTLIFESYSKAKEQYLKGLEFARDNEHHKYKLRLALCFLSNL |
| | protein | WNKDNKWLDFDTDNIPDKIEVAYYYTNNKEFNKAEKVINELENMELYEYDSGILDYIKGILYQNKNYFY |
| | YopK | ESTAKLKKSGDKLFINLPLAELRKMGCDEKLLELIMV (SEQ D NO: 268) |
| BAMY06_ | DNA primase | MDVYDLKNHIIEKPEYIVLILEQTGFYNVDERGNEYRCARKKGRNPTSVKVNKTTLGATCFSTNLKGDL |
| 01926 | | ITLVQNKLGLSFPKTIKRISEIVDYKSEEEYKPPELPFGGFYKNIRRLSNPMDLDLETYSDDILDQFVS |
| | | VPNKLFYEDGILPLTQSLFQVGYDSVSGRITVPWKSLSGELCGVMGRLNKKEVNDEETKWLPIISFPKS |
| | | KTLYGFVENYSSIREKSIVMIGESEKHSMALASKGLNVGVSLGGSFLSEIQANHIKSMFPKKSLVMMDE |
| | | GLGEEHSVEIANSLKFENFFENEVGYIFDRENKYLPKGSKMAPADLDKSTLHRLIRDCTVWI |
| | | (SEQ D NO: 269) |
| BAMY06_ | SPheta | MPKFWSYPEGLKVIINENAKNACPHHVGREGKIIELLHSATYDYAVSDETGDITFFKEHELNPAKGG |
| 01930 | prophage- | (SEQ D NO: 270) |
| | derived | |
| | uncharacterized | |
| | protein | |
| | YorP | |
| BAMY06_ | Putative | MKKVIAIDMDQVLADLLSDWVAYINTYDDPFLKEEDILCWDISKYSNTQNNVYRHLDYELFRNLDVIEG |
| 01933 | 5′(3′)- | SQRAVKELAKKYEVYVVTTATNHPESLKAKLEWLTEHFPYIPHSNVVLCGNKNIIKADIMIDDGVHNLE |
| | deoxyribo- | TFDGMKILFDAPHNRNDNRFIRVMNWEEIERKLL (SEQ D NO: 271) |
| | nucltotidase | |
| BAMY06_ | N-acetyl- | MTEKYDKWTRLLDMIEPNYAFESAVVGNSIYVLGGARNQKYNKNYSFDTISQKWTQGLDIPTPRVGSCT |
| 02840 | neuraminate | AVIGNYIYVLGGYKGANVYSSVDVYDTKTNTWGRVPDIPTPTCHASAAVINDTIYLIGGFDTDAAHSQH |
| | epimerase | YAFDTLSKTWSVKKAPPINIYATETEVFNGKIYLVGGQTKEVVQGHIRSDLNEYIYEYDPVMDRWNRKK |
| | | FLGPLQNTSTAVLNNKIYIIGGRKNPSVIEPLTKVYDPIKDEISVEKPYPFERYDARIAAVGDNLYLFG |
| | | GLTPSGYALEYLHALTPVKTEEDKDGEPKNPEEPPNKQPASNRAILLVTMTTGLEKEFDLSMEEIKDFI |
| | | RWYDQKSSGIGLSRYVIEKHYNNIGPFQNRRDHIVFGNILTFNVSEYTLDK (SEQ D NO: 272) |
| BAMY06_ | Low molecular | MAGYKKAAPRIARLLDYVPESDLADVPDPYYTGNFSEVYALVESGCRHLLETIKKDHHL |
| 03260 | weight protein- | (SEQ D NO: 273) |
| | tyrosine- | |
| | phosphatase | |
| | YfkJ | |
| BAMY06_ | Tartrate | MGKEVVPQAERVLNAIAELHGGIAFDFTSFPRSCEYYLEHGTMMPDDGLETLQHFDALFLGAVGNQKLV |
| | dehydrogenase/ | PDHVSLWGLPIKIRR (SEQ D NO: 274) |
| | decarboxylase | |
| BAMY06_ | Mitomycin | MTNSVQQDKQVPKKYPQAAVMQMVSGLGFSLAVKTAVELDVFSAFQNGPASAEAIAEALELNPSALFRL |
| 03859 | biosynthesis | LRALESVGLVAQAQNGYYDVTEYGATLMPGKAKSIEPLVEYLLHETVVQSMFKMDYSIKTGKSAFEAIY |
| | 6-O-methyl- | GDKWYENNSLDQDYLKTMDKAMEIYSKMSLPSILKAYSFEKFDVIVDVAGGMGQLITGILGVAPKSKGI |
| | transferase | LFDLPKTIQSAKKHLASSEMSERCQFTEGSMFEEIPSGGDLYVISKVLNDWDDEHVVAILENIAGAMSD |
| | | HSKLIIVENVPEADRLSPEEAFRDLLFLVCSAGGRVRKITEFEQLIEKAGLTLLNVIQTPSKYTILECG |
| | | KK (SEQ D NO: 275) |
| BAMY06_ | 1-hydroxy- | MKNTEENKTAIIIGGGIAGMAAGCYLQMNGYSTKIFEMGLLPGGLCTGWKRKGYFFDGCISWLVGSGPN |
| | cartenoid | NTFHKFWKELNVIQNMEFINDEEFAVVNFRNGDTFTLYADVDKLEQEFLRVAPEDAETIKLLTDGIRVV |
| | 3,4-desaturase | SDVELDLDKAPELFDLADFEAFKAKAGPYMKVMGQWGKVTIKEFAQRFKSSFVRENVNRLFWFNVDTPI |
| | | SYFMATLGWANSKSSGHPVEGSLQFAKIIEARYVELGGEIQYKSPVSKVLVENDKAIGIELKNGQCHYG |
| | | DIVISAADGYKTIFEMLDGKYTDDELTFCYDNLKTSAPQIYVGLGVSKTFEKYPHYLSLELEQPLNAYG |
| | | CDNVKNIFVKIYNENPSFAPDGKTSIIVYAKTSAEYWETLQKNNREKYEEEKKAIANVMIDELDKWFGE |
| | | IKSNIDVTDVSTPYTIRRYTNNRNGSWQGWEKQMEGIMHEKKLKRSLPGLKDFYMVGHWSQVGGGLPSV |
| | | VLQARNLVQVLCKEDGKVFETKIN (SEQ D NO: 276) |

TABLE 59
Bacillus strain 071 (BAMY0071) protein sequences

| Gene | Annotation | Sequence |
|---|---|---|
| BAMY71_ | Cysteine/ | MNSPLRCIEKINNAILFFNFIYNYSYHTIKNGSITLANEGDLMSIIAFLSYVLMTSITPGPSNILMMNEA |
| 00040 | O-acetylserine | RRAGFIGSWRFNGGILTGFAVLGILSGLFTMSVYHWIPVVEPYFKIAGAVYLLYLAWQISLPKTSKGDSE |
| | efflux protein | KTRSSFLSGFLFQMINIKSILFFLTLMSAFILPFQHTYPLIAFWLASAILLGWAALLLWSAFGSVFKHLF |
| | | EKHDKAFRIVMCLLLIYSAVSIYL (SEQ D NO: 277) |
| BAMY71_ | Immunity | MKKYLFSAGIIVLTVFTWVCTYSSLPDNLATHWGLNGSANDYQTKANAMMMLIGIMIILYILMVIIPKID |
| 00089 | protein | PKNNYKTFIRPYMAIFNTMFAVLFVINLITILTGLGYDLPISYLGNFIVGVIFMVFGNFIQIVKPNFFLG |
| | SdpI | IRTPWTLSSESVWKDTHRVSSKLFVLAGMLMMLAAFLPPVYRVSVIFMAAIGCIILSLLYSYIVYQRQLN |
| | | K (SEQ D NO: 278) |
| BAMY71_ | Immunity | MAKIGDGCLELEITPRRYHEAKDDPFISTTFELLEHNKAIARDYSAVLLESEYKMLISDIEALSAGNQDR |
| 00185 | protein | IRLETIEPFFILSIDKENEHYRFIIRFMENHSNTTFYKLNCNEEKLEIFVKTLKSDLKDSKTLLGR |
| | WapI | (SEQ D NO: 279) |
| BAMY71_ | Immunity | MSELVFTRINTKINTSGPIILSMNAAELIVLAQEKVRKEEYINHIFIFRNGDGHLRHRYQIQTSMNIIGV |
| 00194 | protein | QKSGDLFLFLIHKDYEDGVIQEDPNIYIWHPLKGFYHSLYGGRYIRSMTVDSANNLWLGYDEAGIFSCLD |
| | WapI | DDISSKGVARFPFEDGTWKSCSDTFRTAPHLIDHFYGAYAKKDAMYLHYRTLGEDYIRKVDLQGETLSFH |
| | | RADFDFSAQFKKDSSYYFLIRNQASCQIDKALKFHNMTKQAGEYQLTDKISRKPLRFTQVAAYQDKAAGI |
| | | DESNRLYLLS (SEQ D NO: 280) |
| BAMY71_ | Tyrosine | MASIEPRGKNSFRLIVENGYDAKGKRDRRKKTIRIEDPKLLKTKRKLQEYLEDQLHRFRIEVEAGEYIAP |
| 02759 | recombinase | EKSTFDSFAEKWIEKKLFNKNGKPYSFTTSVKYSNHLKNHILPALGHKKIDKIKSLHIVDFIDDLSKDGA |
| | XerC | RKDGKPGGLGDQTIKDIFKILQALFKTATEEWKLIKDDPIEGLSSPEAENKEMNFLESDEAAECIKVLYE |
| | | IDIKWRLYYLAALIGGLRRGEALACEWHLDVDWDKGGIYVNRSISKTINGEPHVKSPKSKSSQRFVKMPD |
| | | FYMNELAKYYRLWKKEKLLLGDAWEGGEHQYVFHSGKGKPYYYTTPTAKWTKIKKKYGLKDVRLHDLRHT |
| | | MVALLMEAGES (SEQ D NO: 281) |
| BAMY71_ | N-acetyl- | MNREKRLELKKVKPKHLQQFNQLLRYVFQVTNSNLHEVGWKEPEIASAKLPVLEQAHVLGWFDKDKLVSQ |
| 02900 | transferase | AAVYPFQVRIFNKTFEMGGVTGVGTYPEYANMGLMAKLLYKALVDMRERGQSVSYLFPYSIPYYRRKGWE |
| | Eis | IISDKMTFEVKDFQLPKMSTVSGEVERVEPEHEVIKEVYSRFAHKSHAAMIRNELAWDEYWRWDLEELTA |
| | | AVYYDQSRQANGYVLYWIADEVFHIKEMVYVNEEARRGLWNFISAHFSMVTKVVGDNYSNEPIAFLLEDA |
| | | EIEETISPYFMARIVDIEQFINQYPFKPQKEKRTWSFTLEDPLLEWNQGVFTAEISPEGKAVLSPGGDAD |
| | | AAKLDIQTMTALLFAYRKPEYLHRTGRLECSPDTLEFIEDLLETQTPYFSDYF (SEQ D NO: 282) |
| BAMY71_ | Trans- | MEIETIVRESEANRIQAQTWFSHPEKSKVSFRYDERETSSIRSISIETFLSFYSSKFNREPYSVLDIGCG |
| 03233 | aconitate | QGQVIQYLNSRFQKIELTGIDSSAQAISSAKKLGINASFICSNAENIMQYVSKKQDIIFIHLCFGLFKNP |
| | 2-methyl- | IAIVNTLIHLLSDQSCIYIVDLDRNSLGEGLNTAQSREEEAYLKDQYRASLTLEEFKQLLHVVTKEQHGV |
| | transferase | SFQVGNSFIGGFDETSSQFFSLMRNRNLQDALRTSVGEQFKQSQMPALLHGWIIKNKR |
| | | (SEQ D NO: 283) |
| BAMY71_ | Thymidylate | MRKRTFHEAYTETLYDIYHNPEFFNSPRGQKSREQLNYHLTLENPIERVTYLSSRKTNIVFNFAEVLWYL |
| 03424 | synthase | SGSNDLDFISYYNKKMPSYSMNKKTLTGTAYGPKIFEFGNAKLNQWNRIKNLLTQEDIDSKRAFIQIFDA |
| | | SELFVLENIDVSCTIGLQFFVREGELYMSSVMRANDAFRGMISDLFSFTFMQELMARELRVEVGEYFHNA |
| | | GSIHIYDSDHEWAKTVLEEAENHHDIPEFEFPKMPEGNNWPSIETVLKYEELLRKDQISMTKNDIEMLDL |
| | | PDYWKQILFLFSIYQHIAYKRDMDHSLFQSLLPIYQFFVRNKWFHYFSTEQKEEIQ |
| | | (SEQ D NO: 284) |

TABLE 60
Bacillus strain 105 (BSUB 105) protein sequences

| Gene | Annotation | Sequence |
|---|---|---|
| JS609_ | Beta- | MRKLYHGACYYPELWDEETIQQDIDIMREVGVNVVRIGEFAWSVMEPEEGKIDVGFFKEIIARLYDSGIETIM |
| 00762 | galactosidase | CTPTPTPPIWFSHGRPERMHANEKREIMGHGSRQHACTNNPYFRKKAAIITTAIAKELGRLPGLIGWQLDNEF |
| | YesZ | KCHVAECMCETCLRLWHDWLKNRYGVIERLNEAWGTDVWSETYQTFEQVPQPGPAPFLHHASLRTMYQLFSME |
| | | MIASFADEQAKIIRCYSDAPITHNGSVMFSVDNERMFQNLDFASYDTYASQENASAFLLNCDLWRNLKQGRPF |
| | | WILETSPSYAASLESSAYPHADGYLQAEAVSSYALGSQGFCYWLWRQQRSGSEISHGSVLSAWGEPTIGYQKV |
| | | LAVERARKEIEPIILSTEPVQAEAAMTYSDRAKAFIKTEPHRGLRHRSLVTHFYERILNTGIHRDLIPEGAPL |
| | | DGYRLLFTPFVPYLSSEFIKKASAFAEAGGIWITGPLTGGRTCEHTIHTDCGLGELEKTSGIKTLFTFPMNEN |
| | | VNTGKAFGITAPLGLWSAVFDTESGNTLGTVESGPGAGHAFLTEQNYGEGKIVMLGSLPSGKEGDAMLEALVR |
| | | HYAEEAVISSRSDVTPGTIVAPRKGENGLVWIVVNMDGKGGSVTLPEAGTDLLTHRLEKAGRLAVGPHEYRVI |
| | | QFDNHS (SEQ D NO: 285) |
| JS609_ | Beta- | MSKLEKTHVTEAKFMLHGGDYNPDQWLDRPDILADDIKLMKLSHTNTFSVGIFAWSALEPEEGVYQFEWLDDI |
| 03436 | galactosidase | FERIHSIGGRVILATPSGARPAWLSQTYPEVLRVNASRVKQLHGGRHNHCLTSKVYREKTRHINRLLAERYGH |
| | GanA | HPALLMWHISNEYGGDCHCDLCQHAFREWLKSKYDNSLKALNHAWWTPFWSHTFNDWSQIESPSPIGENGLHG |
| | | LNLDWRRFVTDQTISFYKNEIIPLKELTPDIPITTNFMADTPDLIPYQGLDYSKFAKHVDVISWDAYPVWHND |
| | | WESTADLAMKVGFINDLYRSLKQQSFLLMECTPSAVNWHNVNKAKRPGMNLLSSMQMIAHGSDSVLYFQYRKS |
| | | RGSSEKLHGAVVDHDNSPKNRVFQEVAKVGETLERLSEVVGTKRPAQTAILYDWENHWALEDAQGFAKATKRY |
| | | PQTLQQHYRTFWEHDIPVDVITKEQDFSPYKLLIVPMLYLISEDTISRLKAFTADGGTLVMTYISGVVNEHDL |
| | | TYTGGWHPDLQAIFGVEPLETDTLYPKDRNAVSYRSQIYEMKDYATVIDVKTASVEAVYQEDFYARTPAVTSH |
| | | EYQQGKAYFIGARLEDQFORDFYEGLITDLSLSPVFPVRHGKGVSVQARQDQDNDYIFVMNFTEEKQLVTFDQ |
| | | SVKDIMTGDILSGDLTMEKYEVRIVVNTH (SEQ D NO: 286) |
| JS609_ | Pullulanase | MVSIRRSFEAYVDDMNIITVLIPAEQKEIMTPPFRLETETTVFPLAVREEYSLEAKYKYVCVSDHPVTFGKIH |
| 02990 | | CVRASSGHKTDLQIGAVIRTAAFDDEFYYDGELGAVYTADHTVFKVWAPAATSAAVKLSHPNKSGRTFQMNRL |
| | | EKGVYAVTVTGDLHGYEYLFCICNNLEWMETVDPYAKAVTVNGEKGVVLRPDQMKWTAPLKPFSHPVDAVIYE |
| | | THLRDFSIHENSGMINKGKYLALTETDTQTANGSSSGLAYIKELGVTHVELQPVNDFAGVDEEKPLDAYNWGY |
| | | NPLHFFAPEGSYASNPHDPQTRKTELKQMINTLHQHGLRVILDVVFNHVYKRENSPFEKTVPGYFFRHDECGM |
| | | PSNGTGVGNDIASERRMARKFIADCVVYWLEEYNVDGFRFDLLGILDIDTVLYMKEKATKAKPGILLFGEGWD |
| | | LATPLPHEQKAALANAPRMPGIGFFNDMFRDAVKGNTFHLKAAGFALGSSESAQAVMHGIAGSSGWKALAPIV |
| | | PEPSQSINYVESHDNHTFWDKMSFALPQENDSRKRSRQRLAAAIILLAQGVPFIHSGQEFFRTKQGVENSYQS |
| | | SDSINQLDWDRRETFKEDVHYIRRLISLRKAHPAFRLRSAADIRRHLECLTLKEHLIAYRLYDLDEVDEWKDI |
| | | IVIHHASPDSVEWRLPNDIPYRLLCDPSGFQEDPAEIKKTVAVNGIGTVILYLASDLKSFA |
| | | (SEQ D NO: 287) |
| JS609_ | Spore coat | MKLAFICTEKLPAPAVRGGAIQMMIDGVTPYFSSRYNLTIFSIEDPSLPKRETKDGVHYIHLPKEHYREAVAE |
| 03083 | protein | ELRASSFDLIHVFNRPLNVSLYKKASPNSKIVLSLHNEMFSEKKMTFAQGKEVLDNVSMITTVSEFIKQTVIE |
| | SA | RFPEAEDITKVVYSGVDLNSYPPVWTMKGSAVRKTYRKKYGIEDKKVILFAGRLSPIKGPHLLIHSMRRILQQ |
| | | HPDAVLVIAGGKWFSDDSENQYVTYLRTLALPYRDHIIFTKFIPADDIPNLFLMADVFVCSSQWNEPLARVNY |
| | | EAMAAGTPLITTNRGGNGEVVKDEVTGLVIDSYNKPSSFAKAIDRAFTDQELMNKMTKSARKHVEALFTFTHA |
| | | AKRLNTVYQSVLTPKNKQFPPPFLTQNFDLSSINQLFVKAKT (SEQ D NO: 288) |
| JS609_ | Spore coat | MKIALIATEKLPVPSVRGGAIQIYLEAVAPLIAKKHEVTVFSIKDPNLADREKVDGVHYVHLDEDRYEEAVGA |
| 03086 | protein | ELKKSRFDLVHVCNRPSWVPKLKKQAPDAVFILSVHNEMFAYDKISQAEGEICIDSVAQIVTVSDYIGQTITS |
| | SA | RFPSARSKTKTVYSGVDLKTYHPRWTNEGQRAREEMRSELGLHGKKIVLFVGRLSKVKGPHILLQALPDIIEE |
| | | HPDVMMVFIGSKWFGDNELNNYVKHLHTLGAMQKDHVTFIQFVKPKDIPRLYTMSDVFVCSSQWQEPLARVHY |
| | | EAMAAGLPIITSNRGGNPEVIEEGKNGYIIHDFENPKQYAERINDLLSSSEKRERLGKYSRREAESNFGWQRV |
| | | AENLLSVYEKNR (SEQ D NO: 289) |
| JS609_ | Spore coat | MYQKEHEEQIVSEILSYYPFHIDHVALKSNKSGRKIWEVETDHGPKLLKEAQMKPERMLFITQAHAHLQEKGL |
| 03085 | protein | PIAPIHQTKNGGSCLGTDQVSYSLYDKVTGKEMIYYDAEQMKKVMSFAGHFHHASKGYVCTDESKKRSRLGKW |
| | S | HKLYRWKLQELEGNMQIAASYPDDVFSQTFLKHADKMLARGKEALQALDDSEYETWTKETLEHGGFCFQDFTL |
| | | ARLTEIEGEPFLKELHSITYDLPSRDLRILLNKVMVKLSVWDTDFMVALLAAYDAVYPLTEKQYEVLWIDLAF |
| | | PHLFCAIGHKYYLKQKKTWSDEKYNWALQNMISVEESKDSFLDKLPELYKKIKAYREAN |
| | | (SEQ D NO: 290) |
| JS609_ | Spore coat | MAENHEVIEEGNSSELPLSAEDAKKLTELAENVLQGWDVQAEKIDVIQGNQMALVWKVHTDSGAVCLKRIHRP |
| 02087 | protein | EKKALFSIFAQDYLAKKGMNVPGILPNKKGSLYSKHGSFLFVVYDWIEGRPFELTVKQDLEFIMKGLADFHTA |
| | I | SVGYQPPNGVPIFTKLGRWPNHYTKRCKQMETWKLMAEAEKEDPFSQLYLQEIDGFIEDGLRIKDRLLQSTYV |
| | | PWTEQLKKSPNLCHQDYGTGNTLLGENEQIWVIDLDTVSFDLPIRDLRKMIIPLLDTTGVWDDETFHVMLNAY |
| | | ESRAPLTEEQKQVMFIDMLFPYELYDVIREKYVRKSALPKEELESAFEYERIKANALRQLI |
| | | (SEQ D NO: 291) |
| JS609_ | Cyclodextrin- | MKMAKKCSVFMLCAAVSLSLAACGPKESSSAKSSSKGSELVVWEDKEKSIGIKDAVAAFEKEHDVKVKVVEKP |
| 03439 | binding | YAKQIEDLRMDGPAGTGPDVLTMPGDQIGTAVTEGLLKELHVKKDVQSLYTDASIQSQMVDQKLYGLPKAVET |
| | protein | TVLFYNKDLITEKELPKTLEEWYDYSKKTADGSNFGFLALFDQIYYAESVMSGYGGYIFGKDKDGSYNPSDIG |
| | | INNEGAVKGAALIQKFYKDGLFPAGIIGEQGINVLESLFTEGKAAAIISGPWNVEAFSKAGINYGITKLPKLE |
| | | NRKNMSSFIGVKSYNVSAFTKNEELAQELAVFLANEKNSKTRYEETKEVPAVKSLANDPAIMKSEAARAVTEQ |
| | | SRFSEPTPNIPEMNEIWTPADSALQTVATGKADPKQALDQAAETAKGQIKAKHSGK (SEQ ID NO: 292) |
| JS609_ | Spore coat | MTDTRHMYGGPGFGHYQGFGIGHPGYGMYGGHPGFGMYGGYPDHGIHGGVGGYPGYGTYGGYGGSGGYPSGGY |
| 00739 | protein | GGSPGTVNYPNMHHENDGHHHYYHHHHDGKDNLHHHHHDGHYGHHHHHMGHWGKDGYK |
| | YeeK | (SEQ D NO: 293) |
| JS609_ | Smal1, | MVRNKEKGFPYENENKFQGEPRAKDDYASKRADGSINQHPQERMRASGKR (SEQ D NO: 294) |
| 00895 | acid-soluble | |
| | spore protein | |
| | K | |
| JS609_ | Sporulation- | MSFFKKLAASAGIGAAKVDTILEKDAYFPGEEVQGTVHVKGGKIAQDIRYIDLQLSTRYVIVKDDEEHRKYAT |
| 00935 | control | IHSFRVTGSFTIQPGEEHQFPFTFTLPLDTPITVGKVEVAVVTDLDIQGGIDKSDHDRIFVEAHPWIENVLEA |
| | protein | IENLGFRLNEADCEQAPYFQRRLPFVQEFEFVPTSGYYRQMLDELELIFLLDEDGLEIIFEVDRRARGLRGWL |
| | spo0M | EEMYNDGEQLVRVRFSQSELEDTEELEEVLEEILDQYAE (SEQ D NO: 295) |
| JS609_ | Sporulation | MGFGYGFGGGYGGGCYGGYAGGYGGGYGSTFVLLVVLFILLIIVGASFF (SEQ D NO: 296) |
| 01239 | protein | |
| | YjcZ | |
| JS609_ | Spore coat | MDYPLNEQSFEQITPYDERQPYYYPRPRPPFYPPYYYPRPYYPFYPFYPRPPYYYPRPRPPYYPWHGYGGGYG |
| 01281 | protein T | GGYGGGYGY (SEQ D NO: 297) |
| JS609_ | putative | MKTITIAAKEAKELVRQKLASAGLNERDAEKVADVLVHADLRNVHSHGVLRTEHYVNRLLAGGINPGAQPVFK |
| 01305 | oxidoreductase | ETGPVTGVLDGDDGFGHVNCDMAMDHAIDMAKKKGVGMVTAVNSSHCGALSYFVQKAADEKLIGIAMTHTDSI |
| | YjmC | VVPFGGRTPFLGTNPIAYGVPAKHKKPFILDMATSKVAFGKILQAREEGKEIPEGWGVDENGEAVTDPDKVVS |
| | | LSTFGGPKGYGLSIVVDVFSGLLAGAAFGPHIAKMYSGLDQKRKLGHYVCAINPAFFTDWDTFLEQMDAMIDE |
| | | LQQSPPAVGFERVYVPGEIEQLHEERNKKNGISIARSVYEFLKSR (SEQ D NO: 298) |
| JS609_ | Uric acid | MFTMDDLNQMDTQTLTDTLGSIFEHSSWIAERSAALRPFSSLSDLHRKMTGIVKAADRETQLDLIKKHPRLGT |
| 03269 | degradation | KKTMSDDSVREQQNAGLGKLEQQEYEEFLMLNEHYYDRFGFPFILAVKGKTKQDIHQALLARLESERETEFQQ |
| | bifunctional | ALIEIYRIARFRLADIITEKGETQMKRTMSYGKGNVFAYRTFLKPLTGVKQIPESSFAGRSNSVVGVDVTCEI |
| | protein | GGEAFLPSFTDGDNTLVVATDSMKNFIQRHLASYEGTTTEGFLHYVAHRFLDTYSHMDKITLTGEDIPFEAMP |
| | PucL | AYEEKELSTSHLVFRRSRNERSRSVLKAERSGNTITITEQYSEIMDLQLVKVSGNSFVGFIRDEYTTLPEDGN |
| | | RPLFVYLNISWQYENTNDSYASDPARYVAAEQVRDLASTVFHELETPSIQNLIYHIGCRILARFPQLTDVSFQ |
| | | SQNHTWDTVVEEIPGSKGKVYTEPRPPYGFQHFTVTREDAEKEKQKAAEKCRSLKA (SEQ D NO: 299) |
| JS609_ | Pectate | MKKFVSILFMFGLVMGFSQFQSSTAFAADKVVHETIIVPKNTTYDGKGQRFVAGKELGDGSQSENQDPVFRVE |
| 03519 | lyase C | DGATLKNVVLGAPAADGVHTYGNVNIQNVKWEDVGEDALTVKKEGKVTIDGGSAQKASDKIFQINKASTFTVK |
| | | NFTADNGGKFIRQLGGSTFHVDVIIDKCTITNMKEAIFRTDSKTSTVRMTNTRYSNVGQKWIGVQHIYENNNT |
| | | QF (SEQ D NO: 300) |
| JS609_ | Respiratory | MKKKKMSPLFRRLNYFSPIEHHSNKHSQTTREDRDWENVYRNRWQYDKVVRSTHGVNCTGSCSWNIYVKNGIV |
| 03778 | nitrate | TWEGQNLNYPSTGPDMPDFEPRGCPRGPVFHGISTARSV (SEQ D NO: 301) |
| | reductase 2 | |
| JS609_ | Subtilosin-A | MKKAVIVENKGCATCSIGAACLVDGPIPDFEIAGATGLFGLWG (SEQ D NO: 302) |
| 03785 | | |
| JS609_ | Antilisterial | MFIEQMFPFINESVRVHQLPEGGVLEIDYLRDNVSISDFEYLDLNKTAYELCMRMDGQKTAEQILAEQCAVYD |
| 03786 | bacteriocin | ESPEDHKDWYYDMLNMLQNKQVIQLGNRASRHTITTSGSNEFPMPLHATFELTHRCNLKCAHCYLESSPEALG |
| | subtilosin | TVSIEQFKKTADMLFDNGVLTCEITGGEIFVHPNANEILDYVCKKFKKVAVLTNGTLMRKESLELLKAYKQKI |
| | biosynthesis | IVGISLDSVNSEVHDSFRGRKGSFAQTCKTIKLLSDHGIFVRVAMSVFEKNMWEIHDMAQKVRDLGAKAFSYN |
| | protein | WVDDFGRGRDIVHPTKDAEQHRKFMEYEQNVIDEFKDLIPIIPYERKRAANCGAGWKSIVISPFGEVRPCALF |
| | AlbA | PKEFSLGNIFHDSYESIFNSPLVHKLWQAQAPRFSEHCMKDKCPFSGYCGGCYLKGLNSNKYHRKNICSWAKN |
| | | EQLEDVVQLI (SEQ D NO: 303) |
| JS609_ | Antilisterial | MSPAQRRILLYILSFIFVIGAVVYFVKSDYLFTLIFIAIAILFGMRARKADSR (SEQ D NO: 304) |
| 03787 | bacteriocin | |
| | subtilosin | |
| | biosynthesis | |
| | protein AlbB | |
| JS609_ | Antilisterial | MNNIIPIMSLLFKQLYSRQGKKDAIRIAAGLVILAVFEIGLIRQAGIDESVLRKTYIILALLLMNAYMVFLSV |
| 03789 | bacteriocin | TSQWKESYMKLSCLLPISSRSFWLAQSVVLFVDTCLRRTLFFFILPLFLFGNGTLSGAQTLFWLGRFSFFTVY |
| | subtilosin | SIIFGVVLSNHFVKKKNLMFLLHAAIFACVCISAALMPAATLPLCAVHMLWAVIIDFPVFLQAPPQQSKMHSF |
| | biosynthesis | MRRSEFSFYKREWNRFISSKAMLLNYAVMAAFSGFFSFQMMNTGIFNQQVVYIVISALLLICSPIALLYSIEK |
| | | NDRMLLITLPIKRKTMFWAKYRFYSGLLAGGFLLVVMIVGFISGRPISVLTFLQCIELLLAGAFIRLTADEKR |
| | protein AlbD | PSFSWQTEQQLWSGFSKYRSYLFCLPLFLATLAGTAVSLAVIPIAGLVIVYYLQKQDGGFFDTSKRERLGS |
| | | (SEQ D NO: 305) |

[0704] A listing and tabulation of the sequences provided herein and in the sequence listing is provided below in TABLE 61:

TABLE 61

| | |
|---|---|
| SEQ ID NO 1 | BAML24_part1 |
| SEQ ID NO 2 | BAML24_part2 |
| SEQ ID NO 3 | BAML24_part3.fna |
| SEQ ID NO 4 | BAML24_part4.fna |
| SEQ ID NO 5 | BVEN24.fna |
| SEQ ID NO 6 | BAML36_C01_part1.fna |
| SEQ ID NO 7 | BAML36_C01_part2.fna |
| SEQ ID NO 8 | BAML36_C01_part3.fna |
| SEQ ID NO 9 | BAML36_C01_part4.fna |
| SEQ ID NO 10 | BAML36_C01.fna |
| SEQ ID NO 11 | BAML36_C02.fna |
| SEQ ID NO 12 | BSUB105_part1.fna |
| SEQ ID NO 13 | BSUB105_part2.fna |
| SEQ ID NO 14 | BSUB105_part3.fna |
| SEQ ID NO 15 | BSUB105_part4.fna |
| SEQ ID NO 16 | BSUB105.fna |
| SEQ ID NO 17 | BAMY_00429 |
| SEQ ID NO 18 | BAMY_00854 |
| SEQ ID NO 19 | BSUB_00009 |
| SEQ ID NO 20 | pta_54 |
| SEQ ID NO 21 | pycA_51 |
| SEQ ID NO 22 | rpoD_30 |
| SEQ ID NO 23 | tpiA_53 |
| SEQ ID NO 24 | glpF_3 |
| SEQ ID NO 25 | ilvD_57 |
| SEQ ID NO 26 | pta_61 |
| SEQ ID NO 27 | purH_1 |
| SEQ ID NO 28 | pycA_4 |
| SEQ ID NO 29 | rpoD_1 |
| SEQ ID NO 30 | tpiA_1 |
| SEQ ID NO 31 | ilvD_61 |
| SEQ ID NO 32 | pta_54 |
| SEQ ID NO 33 | pycA_51 |
| SEQ ID NO 34 | rpoD_30 |
| SEQ ID NO 35 | tpiA_53 |
| SEQ ID NO 36 | bsubtilis.glpF-faa62a0d09e3a6a685bd7c6c75b60369 |
| | BVEN24.fna |
| SEQ ID NO 37 | bsubtilis.purH-0f3c240ed708269f5eae590bedd2c888 |
| | BVEN24.fna |
| SEQ ID NO 38 | bsubtilis.glpF-faa62a0d09e3a6a685bd7c6c75b60369 |
| | BAML36.fna |
| SEQ ID NO 39 | bsubtilis.purH-0f3c240ed708269f5eae590bedd2c888 |
| | BAML36.fna |
| SEQ ID NO 40 | Plantaricin C_B. amyloliquefaceins #24 |
| SEQ ID NO 41 | LCI_B. amyloliquefaceins #24 |
| SEQ ID NO 42 | CircularinA_B. amyloliquefaceins #24 |
| SEQ ID NO 43 | Plantaricin C_B. amyloliquefaceins #36 |
| SEQ ID NO 44 | Circularin A_B. amyloliquefaceins #36 |
| SEQ ID NO 45 | LCI #24 #36 |
| SEQ ID NO 46 | Subtilosin A #105 |
| SEQ ID NO 47 | DNAX24 |
| SEQ ID NO 48 | DNAX 24 DNA |
| SEQ ID NO 49 | DNAX36 |
| SEQ ID NO 50 | DNAX 36 DNA |
| SEQ ID NO 51 | FMT 24 |
| SEQ ID NO 52 | FMT 24 DNA |
| SEQ ID NO 53 | FMT 36 |
| SEQ ID NO 54 | FMT 36 DNA |
| SEQ ID NO 55 | DNAA24 |
| SEQ ID NO 56 | DNAA24 DNA |
| SEQ ID NO 57 | DNAA36 |
| SEQ ID NO 58 | DNAA36 DNA |
| SEQ ID NO 59 | BVEN24_01791 |
| SEQ ID NO 60 | BVEN24_01791-protein |
| SEQ ID NO 61 | BVEN24_01661 |
| SEQ ID NO 62 | BVEN24_01661-protein |
| SEQ ID NO 63 | BVEN24_01292 |
| SEQ ID NO 64 | BVEN24_01292-protein |
| SEQ ID NO 65 | BVEN24_01010 |
| SEQ ID NO 66 | BVEN24_01010-protein |
| SEQ ID NO 67 | BVEN24_02313 |
| SEQ ID NO 68 | BVEN24_02313-protein |
| SEQ ID NO 69 | BVEN24_00384 |
| SEQ ID NO 70 | BVEN24_00384-protein |
| SEQ ID NO 71 | BVEN24_03064 |
| SEQ ID NO 72 | BVEN24_03064-protein |
| SEQ ID NO 73 | BVEN24_01295 |
| SEQ ID NO 74 | BVEN24_01295 -protein |
| SEQ ID NO 75 | BVEN24_01358 |
| SEQ ID NO 76 | BVEN24_01358 -protein |
| SEQ ID NO 77 | BVEN24_03390 |
| SEQ ID NO 78 | BVEN24_03390-protein |
| SEQ ID NO 79 | BVEN24_00352 |
| SEQ ID NO 80 | BVEN24_00352-protein |
| SEQ ID NO 81 | BVEN24_00492 |
| SEQ ID NO 82 | BVEN24_00492-protein |
| SEQ ID NO 83 | BVEN24_00796 |
| SEQ ID NO 84 | BVEN24_00796-protein |
| SEQ ID NO 85 | BVEN24_01233 |
| SEQ ID NO 86 | BVEN24_01233-protein |
| SEQ ID NO 87 | BVEN24_01465 |
| SEQ ID NO 88 | BVEN24_01465 -protein |
| SEQ ID NO 89 | BVEN24_00187 |
| SEQ ID NO 90 | BVEN24_00187-protein |
| SEQ ID NO 91 | BVEN24_02209 |
| SEQ ID NO 92 | BVEN24_02209 -protein |
| SEQ ID NO 93 | BVEN24_00552 |
| SEQ ID NO 94 | BVEN24_00552 -protein |
| SEQ ID NO 95 | BVEN24_03922 |
| SEQ ID NO 96 | BVEN24_03922 -protein |
| SEQ ID NO 97 | BVEN24_00837 |
| SEQ ID NO 98 | BVEN24_00837-protein |
| SEQ ID NO 99 | BVEN24_02921 |
| SEQ ID NO 100 | BVEN24_02921-protein |
| SEQ ID NO 101 | BVEN24_02742 |
| SEQ ID NO 102 | BVEN24_02742-protein |
| SEQ ID NO 103 | BVEN24_01491 |
| SEQ ID NO 104 | BVEN24_01491 -protein |
| SEQ ID NO 105 | BVEN24_03613 |
| SEQ ID NO 106 | BVEN24_03613-protein |
| SEQ ID NO 107 | BVEN24_00979 |
| SEQ ID NO 108 | BVEN24_00979-protein |
| SEQ ID NO 109 | BVEN24_00495 |
| SEQ ID NO 110 | BVEN24_00495- protein |
| SEQ ID NO 111 | BVEN24_01455 |
| SEQ ID NO 112 | BVEN24_01455-protein |
| SEQ ID NO 113 | BVEN24_03643 |
| SEQ ID NO 114 | BVEN24_03643 -protein |
| SEQ ID NO 115 | BVEN24_00306 |
| SEQ ID NO 116 | BVEN24_00306 -protein |
| SEQ ID NO 117 | BVEN24_03047 |
| SEQ ID NO 118 | BVEN24_03047-protein |
| SEQ ID NO 119 | BVEN24_00685 |
| SEQ ID NO 120 | BVEN24_00685-protein |
| SEQ ID NO 121 | BVEN24_03249 |
| SEQ ID NO 122 | BVEN24_03249-proein |
| SEQ ID NO 123 | BVEN24_01479 |
| SEQ ID NO 124 | BVEN24_01479-protein |
| SEQ ID NO 125 | BVEN24_01155 |
| SEQ ID NO 126 | BVEN24_01155-protein |
| SEQ ID NO 127 | BVEN24_01174 |
| SEQ ID NO 128 | BVEN24_01174-protein |
| SEQ ID NO 129 | BVEN24_00826 |
| SEQ ID NO 130 | BVEN24_00826 -protein |
| SEQ ID NO 131 | BVEN24_02383 |
| SEQ ID NO 132 | BVEN24_02383-protein |
| SEQ ID NO 133 | BAML36_02571 |
| SEQ ID NO 134 | BAML36_02571-protein |
| SEQ ID NO 135 | BAML36_02703 |
| SEQ ID NO 136 | BAML36_02703-protein |
| SEQ ID NO 137 | BAML36_03077 |
| SEQ ID NO 138 | BAML36_03077-protein |
| SEQ ID NO 139 | BAML36_03361 |
| SEQ ID NO 140 | BAML36_03361-protein |
| SEQ ID NO 141 | BAML36_02047 |
| SEQ ID NO 142 | BAML36_02047-protein |
| SEQ ID NO 143 | BAML36_03989 |
| SEQ ID NO 144 | BAML36_03989-protein |
| SEQ ID NO 145 | BAML36_01284 |
| SEQ ID NO 146 | BAML36_01284-protein |
| SEQ ID NO 147 | BAML36_03075 |
| SEQ ID NO 148 | BAML36_03075-protein |
| SEQ ID NO 149 | BAML36_03012 |
| SEQ ID NO 150 | BAML36_03012-protein |
| SEQ ID NO 151 | BAML36_00964 |
| SEQ ID NO 152 | BAML36_00964-protein |
| SEQ ID NO 153 | BAML36_04020 |
| SEQ ID NO 154 | BAML36_04020-protein |
| SEQ ID NO 155 | BAML36_03879 |
| SEQ ID NO 156 | BAML36_03879-protein |
| SEQ ID NO 157 | BAML36_03575 |
| SEQ ID NO 158 | BAML36_03575-protein |
| SEQ ID NO 159 | BAML36_03137 |
| SEQ ID NO 160 | BAML36_03137-protein |
| SEQ ID NO 161 | BAML36_02905 |
| SEQ ID NO 162 | BAML36_02905-protein |
| SEQ ID NO 163 | BAML36_00061 |
| SEQ ID NO 164 | BAML36_00061-protein |
| SEQ ID NO 165 | BAML36_02156 |
| SEQ ID NO 166 | BAML36_02156-protein |
| SEQ ID NO 167 | BAML36_03818 |
| SEQ ID NO 168 | BAML36_03818-protein |
| SEQ ID NO 169 | BAML36_00426 |
| SEQ ID NO 170 | BAML36_00426-protein |
| SEQ ID NO 171 | BAML36_03533 |
| SEQ ID NO 172 | BAML36_03533-protein |
| SEQ ID NO 173 | BAML36_01431 |
| SEQ ID NO 174 | BAML36_01431-protein |
| SEQ ID NO 175 | BAML36_01616 |
| SEQ ID NO 176 | BAML36_01616-protein |
| SEQ ID NO 177 | BAML36_02877 |
| SEQ ID NO 178 | BAML36_02877-protein |
| SEQ ID NO 179 | BAML36_00739 |
| SEQ ID NO 180 | BAML36_00739-protein |
| SEQ ID NO 181 | BAML36_03392 |
| SEQ ID NO 182 | BAML36_03392-protein |
| SEQ ID NO 183 | BAML36_03875 |
| SEQ ID NO 184 | BAML36_03875-protein |
| SEQ ID NO 185 | BAML36_02915 |
| SEQ ID NO 186 | BAML36_02915-protein |
| SEQ ID NO 187 | BAML36_00708 |
| SEQ ID NO 188 | BAML36_00708-protein |
| SEQ ID NO 189 | BAML36_04065 |
| SEQ ID NO 190 | BAML36_04065-protein |
| SEQ ID NO 191 | BAML36_01301 |
| SEQ ID NO 192 | BAML36_01301-protein |
| SEQ ID NO 193 | BAML36_03683 |
| SEQ ID NO 194 | BAML36_03683-protein |
| SEQ ID NO 195 | BAML36_01102 |
| SEQ ID NO 196 | BAML36_01102-protein |
| SEQ ID NO 197 | BAML36_02890 |
| SEQ ID NO 198 | BAML36_02890-protein |
| SEQ ID NO 199 | BAML36_03214 |
| SEQ ID NO 200 | BAML36_03214-protein |
| SEQ ID NO 201 | BAML36_03195 |
| SEQ ID NO 202 | BAML36_03195-protein |
| SEQ ID NO 203 | BAML36_03545 |
| SEQ ID NO 204 | BAML36_03545-protein |
| SEQ ID NO 205 | BAML36_01977 |
| SEQ ID NO 206 | BAML36_01977-protein |
| SEQ ID NO 207 | BSUB105_03898 |
| SEQ ID NO 208 | BSUB105_03898-protein |
| SEQ ID NO 209 | BSUB105_03508 |
| SEQ ID NO 210 | BSUB105_03508-protein |
| SEQ ID NO 211 | BSUB105_03228 |
| SEQ ID NO 212 | BSUB105_03228-protein |
| SEQ ID NO 213 | BSUB105_03203 |
| SEQ ID NO 214 | BSUB105_03203-protein |
| SEQ ID NO 215 | BSUB105_02743 |
| SEQ ID NO 216 | BSUB 105_02743-protein |
| SEQ ID NO 217 | BSUB105_02464 |
| SEQ ID NO 218 | BSUB105_02464-protein |
| SEQ ID NO 219 | BSUB105_02447 |
| SEQ ID NO 220 | BSUB105_02447 protein |
| SEQ ID NO 221 | BSUB105_02319 |
| SEQ ID NO 222 | BSUB105_02319-protein |
| SEQ ID NO 223 | BSUB105_02159 |
| SEQ ID NO 224 | BSUB105_02159-protein |
| SEQ ID NO 225 | BSUB 105_02999 |
| SEQ ID NO 226 | BSUB105_02999-protein |
| SEQ ID NO 227 | BSUB105_01250 |
| SEQ ID NO 228 | BSUB105_01250-protein |
| SEQ ID NO 229 | BSUB105_01052 |
| SEQ ID NO 230 | BSUB105_01052-protein |
| SEQ ID NO 231 | BSUB105_01039 |
| SEQ ID NO 232 | BSUB105_01039-protein |
| SEQ ID NO 233 | BSUB105_01026 |
| SEQ ID NO 234 | BSUB105_01026-protein |
| SEQ ID NO 235 | BSUB105_01018 |
| SEQ ID NO 236 | BSUB105_01018-protein |
| SEQ ID NO 237 | BSUB105_00862 |
| SEQ ID NO 238 | BSUB105_00862-protein |
| SEQ ID NO 239 | BSUB105_00773 |
| SEQ ID NO 240 | BSUB105_00773-protein |
| SEQ ID NO 241 | BSUB105_00728 |
| SEQ ID NO 242 | BSUB105_00728-protein |
| SEQ ID NO 243 | BSUB105_00700 |
| SEQ ID NO 244 | BSUB105_00700-protein |
| SEQ ID NO 245 | BSUB105_03452 |
| SEQ ID NO 246 | BSUB105_03452-protein |
| SEQ ID NO 247 | BSUB105_00590 |
| SEQ ID NO 248 | BSUB105_00590-protein |
| SEQ ID NO 249 | BSUB105_00445 |
| SEQ ID NO 250 | BSUB105_00445-protein |
| SEQ ID NO 251 | BSUB105_00431 |
| SEQ ID NO 252 | BSUB105_00431-protein |
| SEQ ID NO 253 | BSUB105_00268 |
| SEQ ID NO 254 | BSUB105_00268-protein |
| SEQ ID NO 255 | BSUB105_00074 |
| SEQ ID NO 256 | BSUB 105_00074-protein |
| SEQ ID NO 257 | BSUB105_03255 |
| SEQ ID NO 258 | BSUB105_03255-protein |
| SEQ ID NO 259 | ELA191006 16SrRNA BVEN6_C18 |
| SEQ ID NO 260 | ELA202071 16SrRNA BVEN2071_C21 |
| SEQ ID NO 261 | BAMY06 ELA191006 strain genome na |
| SEQ ID NO 262 | BAMY071 ELA202071 strain genome na |
| SEQ ID NO 263 | BAMY06_01888 protein |
| SEQ ID NO 264 | BAMY06_00183 protein |
| SEQ ID NO 265 | BAMY06_01794 protein |
| SEQ ID NO 266 | BAMY06_01845 protein |
| SEQ ID NO 267 | BAMY06_01849 protein |
| SEQ ID NO 268 | BAMY06_01874 protein |
| SEQ ID NO 269 | BAMY06_01926 protein |
| SEQ ID NO 270 | BAMY06_01930 protein |
| SEQ ID NO 271 | BAMY06_01933 protein |
| SEQ ID NO 272 | BAMY06_02840 protein |
| SEQ ID NO 273 | BAMY06_03260 protein |
| SEQ ID NO 274 | BAMY06_03522 protein |
| SEQ ID NO 275 | BAMY06_03859 protein |
| SEQ ID NO 276 | BAMY06_03861 protein |
| SEQ ID NO 277 | BAMY71_00040 protein |
| SEQ ID NO 278 | BAMY71_00089 protein |
| SEQ ID NO 279 | BAMY71_00185 protein |
| SEQ ID NO 280 | BAMY71_00194 protein |
| SEQ ID NO 281 | BAMY71_02759 protein |
| SEQ ID NO 282 | BAMY71_02900 protein |
| SEQ ID NO 283 | BAMY71_03233 protein |
| SEQ ID NO 284 | BAMY71_03424 protein |
| SEQ ID NO 285 | JS609_00762 protein |
| SEQ ID NO 286 | JS609_03436 protein |
| SEQ ID NO 287 | JS609_02990 protein |
| SEQ ID NO 288 | JS609_03083 protein |
| SEQ ID NO 289 | JS609_03086 protein |
| SEQ ID NO 290 | JS609_03085 protein |
| SEQ ID NO 291 | JS609_03087 protein |
| SEQ ID NO 292 | JS609_03439 protein |
| SEQ ID NO 293 | JS609_00739 protein |
| SEQ ID NO 294 | JS609_00895 protein |
| SEQ ID NO 295 | JS609_00935 protein |
| SEQ ID NO 296 | JS609_01239 protein |
| SEQ ID NO 297 | JS609_01281 protein |
| SEQ ID NO 298 | JS609_01305 protein |
| SEQ ID NO 299 | JS609_03269 protein |
| SEQ ID NO 300 | JS609_03519 protein |
| SEQ ID NO 301 | JS609_03778 protein |
| SEQ ID NO 302 | JS609_03785 protein |
| SEQ ID NO 303 | JS609_03786 protein |
| SEQ ID NO 304 | JS609_03787 protein |
| SEQ ID NO 305 | JS609_03789 protein |

[0705] This invention may be embodied in other forms or carried out in other ways without departing from the spirit or essential characteristics thereof. The present disclosure is therefore to be considered as in all aspects illustrated and not restrictive, the scope of the invention being indicated by the appended Claims, and all changes which come within the meaning and range of equivalency are intended to be embraced therein.

[0706] Various references are cited throughout this Specification, each of which is incorporated herein by reference in its entirety.

1. A probiotic composition comprising at least one of: a first isolated Bacillus amyloliquefaciens strain, a second isolated Bacillus amyloliquefaciens strain, and a first isolated Bacillus subtilis strain; and a carrier suitable for animal administration;
wherein said composition reduces or inhibits the colonization of an animal by a pathogenic bacterium when an effective amount is administered to an animal, as compared to an animal not administered the composition; and
wherein the first isolated Bacillus amyloliquefaciens strain comprises a nucleic acid sequence having at least 95%, at least 96%, at least 97%, at least 98%, or at least 99% sequence identity with SEQ ID NO: 5 or comprises a nucleic acid sequence having at least 95%, at least 96%, at least 97%, at least 98%, or at least 99% sequence identity with SEQ ID NO: 261;
wherein the second Bacillus amyloliquefaciens strain comprises a nucleic acid sequence having at least 95%, at least 96%, at least 97%, at least 98%, or at least 99% sequence identity with SEQ ID NO: 10 or 11 or comprises a nucleic acid sequence having at least 95%, at least 96%, at least 97%, at least 98%, or at least 99% sequence identity with SEQ ID NO: 262;
wherein the first Bacillus subtilis strain comprises a nucleic acid sequence having at least 95%, at least 96%, at least 97%, at least 98%, or at least 99% sequence identity with SEQ ID NO: 16.

2. The composition according to claim 1, wherein the composition comprises at least two of: the first isolated Bacillus amyloliquefaciens strain, the second isolated Bacillus amyloliquefaciens strain, and the first isolated Bacillus subtilis strain.

3. The composition according to claim 1, wherein the composition comprises the first isolated Bacillus amyloliquefaciens strain, the second isolated Bacillus amyloliquefaciens strain, and the first isolated Bacillus subtilis strain.

4. The composition according to claim 1, wherein the carrier is selected from edible food grade material, mineral mixture, gelatin, cellulose, carbohydrate, starch, glycerin, water, rice hulls, glycol, molasses, calcium carbonate, whey, sucrose, dextrose, soybean oil, vegetable oil, sesame oil, and corn oil.

5. (canceled)

6. (canceled)

7. The composition according to claim 1, wherein Bacillus amyloliquefaciens and/or Bacillus subtilis are the only bacterial strains in the composition.

8. (canceled)

9. The composition according to claim 1, wherein the first isolated Bacillus amyloliquefaciens strain comprises a nucleic acid sequence having at least 95%, at least 96%, at least 97%, at least 98%, or at least 99% sequence identity with at least one of SEQ ID NO: 1, SEQ ID NO: 2, SEQ ID NO: 3, and SEQ ID NO: 4 or comprises a nucleic acid sequence having at least 95%, at least 96%, at least 97%, at least 98%, or at least 99% sequence identity with SEQ ID NO: 261;
the second isolated Bacillus amyloliquefaciens strain comprises a nucleic acid sequence having at least 95%, at least 96%, at least 97%, at least 98%, or at least 99% sequence identity with at least one of SEQ ID NO: 6, SEQ ID NO: 7, SEQ ID NO: 8, SEQ ID NO: 9, SEQ ID NO: 10, and SEQ ID NO: 11 or comprises a nucleic acid sequence having at least 95%, at least 96%, at least 97%, at least 98%, or at least 99% sequence identity with SEQ ID NO: 262; and
the first isolated Bacillus subtilis strain comprises a nucleic acid sequence having at least 95%, at least 96%, at least 97%, at least 98%, or at least 99% sequence identity with at least one of SEQ ID NO: 12, SEQ ID NO: 13, SEQ ID NO: 14, and SEQ ID NO: 15.

10. (canceled)

11. (canceled)

12. (canceled)

13. (canceled)

14. The composition according to claim 1, wherein the composition comprises: (a) the first isolated Bacillus amyloliquefaciens strain; and the second isolated Bacillus amyloliquefaciens strain or the first isolated Bacillus subtilis strain; or (b) the first isolated Bacillus amyloliquefaciens strain and the second isolated Bacillus amyloliquefaciens strain.

15. (canceled)

16. The composition according to claim 14, wherein at least one unique metabolite is secreted by the combination of the first isolated Bacillus amyloliquefaciens strain and the second isolated Bacillus amyloliquefaciens strain, wherein the at least one metabolite is selected from: histidine, N-acetylhistidine, phenyllactate (PLA), 1-carboxyethyltyrosine, 3-(4-hydroxyphenyl)lactate (HPLA), tryptophan, N-acetyltryptophan, anthranilate, indolelactate, isovalerylglycine, N-acetylisoleucine, N-acetylmethionine, urea, ornithine, spermidine, spermine, cysteinylglycine, pyruvate, sucrose, fumarate, deoxycarnitine, 2R,3R-dihydroxybutyrate, chiro-inositol, glycerophosphorylcholine (GPC), 5-aminoimidazole-4-carboxamide, xanthine, AMP, 2′-deoxyadenosine, dihydroorotate, UMP, uridine, CMP, cytidine, (3′-5′)-adenylyluridine, (3′-5′)-cytidylyladenosine, (3′-5′)-cytidylylcytidine, (3′-5′)-cytidylyluridine, (3′-5′)-guanylylcytidine, (3′-5′)-guanylyluridine, (3′-5′)-uridylylcytidine, (3′-5′)-uridylyluridine, (3′-5′)-uridylyladenosine, NAD+, oxalate (ethanedioate), maltol, 1-methylhistidine, N6,N6-dimethyllysine, S-methylcysteine, and 2-methylcitrate.

17. (canceled)

18. (canceled)

19. The composition according to claim 1, wherein the composition comprises the first isolated Bacillus amyloliquefaciens strain, the second isolated Bacillus amyloliquefaciens strain, and the first isolated Bacillus subtilis strain.

20. The composition according to claim 19, wherein at least one unique metabolite is secreted by the combination of the first isolated Bacillus amyloliquefaciens strain, the second isolated Bacillus amyloliquefaciens strain, and the first isolated Bacillus subtilis strain; wherein the at least one metabolite is selected from:
N-carbamoylserine, beta-citrylglutamate, N6-methyllysine, N6,N6-dimethyllysine, N6,N6,N6-trimethyllysine, saccharopine, cadaverine, N-succinyl-phenylalanine, 2-hydroxyphenylacetate, 3-(4-hydroxyphenyl)lactate (HPLA), N-acetyltryptophan, indolelactate, N-acetylleucine, 4-methyl-2-oxopentanoate, homocitrulline, dimethylarginine (ADMA+SDMA), N-monomethylarginine, guanidinoacetate, N(1)-acetylspermine, glucose 6-phosphate, Isobar: hexose diphosphates, ribitol, arabonate/xylonate, ribulonate/xylulonate/lyxonate, fructose, galactonate, isocitric lactone, fumarate, malate, 3-hydroxyhexanoate, 5-hydroxyhexanoate, myo-inositol, chiro-inositol glycerophosphoethanolamine, glycerophosphoinositol, 3-hydroxy-3-methylglutarate, Mevalonate, 5-aminoimidazole-4-carboxamide, 2′-AMP, 2′-O-methyladenosine, N6-succinyladenosine, guanosine 2′-monophosphate (2′-GMP), 2′-O-methyluridine, uridine 2′-monophosphate (2′-UMP), 5-methylcytosine, pantoate, pantothenate (Vitamin B5), glucarate (saccharate), hippurate, histidinol, homocitrate, pyrraline, 2-keto-3-deoxy-gluconate, pentose acid, N,N-dimethylalanine, Isobar: hexose diphosphates, 2-methylcitrate, and (3′-5′)-adenylylguanosine.

21. The composition according to claim 1, wherein the first isolated Bacillus amyloliquefaciens strain comprises strain ELA191024 deposited with ATCC under patent deposit number PTA-126784 or strain ELA191006 deposited with ATCC under patent deposit number PTA-127064; wherein the second isolated Bacillus amyloliquefaciens strain comprises strain ELA191036 deposited with ATCC under patent deposit number PTA-126785 or strain ELA202071 deposited with ATCC under patent deposit number PTA-127064; and wherein the first isolated Bacillus subtilis strain comprises strain ELA191105 deposited with ATCC under patent deposit number PTA-126786.

22. (canceled)

23. (canceled)

24. The composition according to claim 1, wherein the composition comprises two or more strains and the composition comprises about equal amounts of each strain, comprises a ratio of a first strain and second strain of 0.75-1.5:1 or comprises a ratio of the first isolated Bacillus amyloliquefaciens strain, the second isolated Bacillus amyloliquefaciens strain, and the first isolated Bacillus subtilis strain of 0.75-1.5:1:0.75-1.5.

25. (canceled)

26. The composition according to claim 24, wherein the ratio or amount is characterized by the number of viable spores per gram dry weight.

27. The composition according to claim 26 wherein the composition comprises from about 1e4 to about 1e10 viable spores per gram dry weight.

28. (canceled)

29. The composition according to claim 1, wherein the composition is formulated as animal feed, feed additive, food ingredient, water additive, water-mixed additive, consumable solution, consumable spray additive, consumable solid, consumable gel, injection, or combinations thereof.

30. (canceled)

31. The composition according to claim 1, wherein the animal administered the composition further exhibits at least one improved gut characteristic, as compared to an animal not administered the composition; wherein improved gut characteristics includes at least one of: decreasing pathogen-associated lesion formation in the gastrointestinal tract, increasing feed digestibility, increasing meat quality, increasing egg quality, modulating microbiome, improving short chain fatty acids, improving laying performance, and increasing gut health (reducing permeability and inflammation).

32. The composition according to claim 1, wherein the pathogenic bacterium comprises at least one of: Salmonella Typhimurium, Salmonella Infantis, Salmonella Hadar, Salmonella Enteritidis, Salmonella Newport, Salmonella Kentucky, Clostridium perfringens, Staphylococcus aureus, Streptoccus uberis, Streptococcus suis, Escherichia coli, Campylobacter jejuni, Fusobacterium necrophorum, Avian pathogenic Escherichia coli (APEC), Salmonella Lubbock, Trueperella pyogenes, shiga toxin producing E. coli, enterotoxigenic E. coli, Campylobacter coli, and Lawsonia intracellularis.

33. The composition according to claim 1, wherein the composition treats an infection from at least one of: Salmonella Typhimurium, Salmonella Infantis, Salmonella Hadar, Salmonella Enteritidis, Salmonella Newport, Salmonella Kentucky, Clostridium perfringens, Staphylococcus aureus, Streptoccus uberis, Streptococcus suis, Escherichia coli, Campylobacter jejuni, Fusobacterium necrophorum, Avian pathogenic Escherichia coli (APEC), Salmonella Lubbock, Trueperella pyogenes, shiga toxin producing E. coli, enterotoxigenic E. coli, Campylobacter coli, and Lawsonia intracellularis.

34. The composition according to claim 1, wherein the composition treats at least one of: leaky gut syndrome, intestinal inflammation, necrotic enteritis, and coccidiosis.

35. The composition according to claim 1, wherein the animal is human, non-human, poultry (chicken, turkey), bird, cattle, swine, salmon, fish, cat, horse or dog.

36. The composition according to claim 1, wherein the animal is poultry and wherein the poultry administered the composition further exhibits at least one of: decreased feed conversion ratio, increased weight, increased lean body mass, decreased pathogen-associated lesion formation in the gastrointestinal tract, decreased colonization of pathogens, modulated microbiome, increased egg quality, increased feed digestibility, and decreased mortality rate, as compared to poultry not administered the composition.

37. The composition according to claim 36, wherein feed conversion ratio is decreased by at least 1%, at least 5%, at least 6%, at least 7%, at least 8%, at least 9%, at least 10%, or at least 15%, wherein poultry weight is increased by at least 1%, at least 5%, at least 10%, at least 15%, at least 25%, or at least 50%, wherein pathogen-associated lesion formation in the gastrointestinal tract is decreased by at least 1%, at least 5%, at least 10%, at least 15%, at least 25%, or at least 50%, wherein mortality rate is decreased by at least 1%, at least 5%, at least 10%, at least 15%, at least 25%, or at least 50%.

38. (canceled)

39. (canceled)

40. (canceled)

41. The composition according to claim 36, wherein the pathogen comprises at least one of Salmonella spp., Clostridium spp., Campylobacter spp., Staphylococcus spp., Streptococcus spp., E. coli, and Avian Pathogenic E. coli.

42. The composition according to claim 36, wherein administered comprises in ovo administration, spray administration, immersion, intranasal, intramammary, topical, or inhalation.

43. (canceled)

44. (canceled)

45. The composition according to claim 36, wherein the poultry is a chicken and is a broiler chicken or an egg-producing chicken (layer).

46. (canceled)

47. (canceled)

48. (canceled)

49. The composition according to claim 1, wherein the animal is poultry or swine and the poultry or swine is administered a vaccine prior to or concurrently with the administration of the composition.

50. (canceled)

51. The composition according to claim 36, wherein the animal is poultry and the poultry is administered a vaccine, wherein said vaccine comprises a vaccine that aids in the prevention of coccidiosis.

52. The composition according to claim 1, wherein the isolated strains are inactivated and/or are not genetically engineered.

53. (canceled)

54. (canceled)

55. (canceled)

56. (canceled)

57. (canceled)

58. A method for reducing or inhibiting the colonization of an animal by a pathogenic bacterium, the method comprising administering to an animal an effective amount of a composition according to claim 1.

59. The method according to claim 58, wherein the animal is human, non-human animal, poultry (chicken, turkey), bird, cattle, swine, salmon, fish, cat, horse or dog.

60. (canceled)

61. The method according to claim 58, wherein the method further comprises improving animal health, and wherein improving animal health comprises at least one of decreasing pathogen-associated lesion formation in the gastrointestinal tract, decreasing colonization of pathogens, and decreasing mortality rate.

62. A method of treating necrotic enteritis in poultry, wherein said method comprises administering a composition according to claim 1 to a poultry in need thereof.

63. The method according to claim 58, wherein: (a) the composition comprises the first isolated Bacillus amyloliquefaciens strain, and the second isolated Bacillus amyloliquefaciens strain, and wherein at least one unique metabolite is secreted by the combination of the first isolated Bacillus amyloliquefaciens strain and the second isolated Bacillus amyloliquefaciens strain, wherein the at least one unique metabolite is selected from: histidine, N-acetylhistidine, phenyllactate (PLA), 1-carboxyethyltyrosine, 3-(4-hydroxyphenyl)lactate (HPLA), tryptophan, N-acetyltryptophan, anthranilate, indolelactate, isovalerylglycine, N-acetylisoleucine, N-acetylmethionine, urea, ornithine, spermidine, spermine, cysteinylglycine, pyruvate, sucrose, fumarate, deoxycarnitine, 2R,3R-dihydroxybutyrate, chiro-inositol, glycerophosphorylcholine (GPC), 5-aminoimidazole-4-carboxamide, xanthine, AMP, 2′-deoxyadenosine, dihydroorotate, UMP, uridine, CMP, cytidine, (3′-5′)-adenylyluridine, (3′-5′)-cytidylyladenosine, (3′-5′)-cytidylylcytidine, (3′-5′)-cytidylyluridine, (3′-5′)-guanylylcytidine, (3′-5′)-guanylyluridine, (3′-5′)-uridylylcytidine, (3′-5′)-uridylyluridine, (3′-5′)-uridylyladenosine, NAD+, oxalate (ethanedioate), maltol, 1-methylhistidine, N6,N6-dimethyllysine, S-methylcysteine, and 2-methylcitrate; or
(b) wherein the composition comprises the first isolated Bacillus amyloliquefaciens strain, the second isolated Bacillus amyloliquefaciens strain, and the first isolated Bacillus subtilis strain, wherein at least one unique metabolite is secreted by the combination of the first isolated Bacillus amyloliquefaciens strain, the second isolated Bacillus amyloliquefaciens strain, and the first isolated Bacillus subtilis strain;
wherein the at least one metabolite is selected from: N-carbamoylserine, beta-citrylglutamate, N6-methyllysine, N6,N6-dimethyllysine, N6,N6,N6-trimethyllysine, saccharopine, cadaverine, N-succinyl-phenylalanine, 2-hydroxyphenylacetate, 3-(4-hydroxyphenyl)lactate (HPLA), N-acetyltryptophan, indolelactate, N-acetylleucine, 4-methyl-2-oxopentanoate, homocitrulline, dimethylarginine (ADMA+SDMA), N-monomethylarginine guanidinoacetate, N(1)-acetylspermine, glucose 6-phosphate, Isobar: hexose diphosphates, ribitol, arabonate/xylonate, ribulonate/xylulonate/lyxonate, fructose, galactonate, isocitric lactone, fumarate, malate, 3-hydroxyhexanoate, 5-hydroxyhexanoate, myo-inositol, chiro-inositol glycerophosphoethanolamine, glycerophosphoinositol, 3-hydroxy-3-methylglutarate, Mevalonate, 5-aminoimidazole-4-carboxamide, 2′-AMP, 2′-O-methyladenosine, N6-succinyladenosine, guanosine 2′-monophosphate (2′-GMP), 2′-O-methyluridine, uridine 2′-monophosphate (2′-UMP), 5-methylcytosine, pantoate, pantothenate (Vitamin B5), glucarate (saccharate), hippurate, histidinol, homocitrate, pyrraline, 2-keto-3-deoxy-gluconate, pentose acid, N,N-dimethylalanine, Isobar: hexose diphosphates, 2-methylcitrate, and (3′-5′)-adenylylguanosine.

64. (canceled)

65. (canceled)

66. (canceled)

67. The method according to claim 58, wherein the method does not comprise administration of an antibiotic.

68. A method of preparing a fermentation product comprising the steps of:
(a) obtaining at least one bacterial strain selected from a first isolated Bacillus amyloliquefaciens strain comprising SEQ ID NO: 5 or comprising SEQ ID NO: 261 or nucleic acid encoding one or more of SEQ ID NOs: 263-276, a second isolated Bacillus amyloliquefaciens strain comprising SEQ ID NO: 10 or 11 or comprising SEQ ID NO:262 or nucleic acid encoding one or more of SEQ ID NOs: 277-284, and a first isolated Bacillus subtilis strain comprising SEQ ID NO: 257 or comprising nucleic acid encoding one or more of SEQ ID NOs: 285-305;
(b) contacting the at least one strain of step (a) with cell growth media;
(c) incubating a combination of at least one strain of step (a) and cell growth media of step (b) at a temperature of about 37° C. for an incubation time of about 24 hours; and
(d) cooling the combination of step (c);
wherein the product of step (d) comprises the fermentation product.

69. The method according to claim 68, wherein the cell growth media comprises: (a) g casamino acids/L, 1% glucose, Disodium Phosphate (anhydrous) 6.78 g/L, Monopotassium Phosphate 3 g/L, Sodium Chloride 0.5 g/L, and Ammonium Chloride 1 g/L; or (b) Peptone 30 g/L; Sucrose Yeast extract 8 g/L; KH2PO4 4 g/L; MgSO4 1.0 g/L; and MnSO4 25 mg/L.

70. (canceled)

71. A method of delivering a metabolite to the gut of an animal, said method comprising administering to an animal a composition comprising:
a first isolated Bacillus amyloliquefaciens strain comprising SEQ ID NO: 5 or comprising SEQ ID NO: 261 or nucleic acid encoding one or more of SEQ ID NOs: 263-276, and a second isolated Bacillus amyloliquefaciens strain comprising SEQ ID NO: 10 or 11 or comprising SEQ ID NO:262 or nucleic acid encoding one or more of SEQ ID NOs: 277-284;
wherein the metabolite comprises at least one of:
histidine, N-acetylhistidine, phenyllactate (PLA), 1-carboxyethyltyrosine, 3-(4-hydroxyphenyl)lactate (HPLA), tryptophan, N-acetyltryptophan, anthranilate, indolelactate, isovalerylglycine, N-acetylisoleucine, N-acetylmethionine, urea, ornithine, spermidine, spermine, cysteinylglycine, pyruvate, sucrose, fumarate, deoxycarnitine, 2R,3R-dihydroxybutyrate, chiro-inositol, glycerophosphorylcholine (GPC), 5-aminoimidazole-4-carboxamide, xanthine, AMP, 2′-deoxyadenosine, dihydroorotate, UMP, uridine, CMP, cytidine, (3′-5′)-adenylyluridine, (3′-5′)-cytidylyladenosine, (3′-5′)-cytidylylcytidine, (3′-5′)-cytidylyluridine, (3′-5′)-guanylylcytidine, (3′-5′)-guanylyluridine, (3′-5′)-uridylylcytidine, (3′-5′)-uridylyluridine, (3′-5′)-uridylyladenosine, NAD+, oxalate (ethanedioate), maltol, 1-methylhistidine, N6,N6-dimethyllysine, S-methylcysteine, and 2-methylcitrate.

72. (canceled)

73. The method according to claim 71, wherein the composition is formulated as animal feed, feed additive, food ingredient, water additive, water-mixed additive, consumable solution, consumable spray additive, consumable solid, consumable gel, injection, or combinations thereof.

74. (canceled)

75. The method according to claim 71, wherein the carrier is selected from edible food grade material, mineral mixture, gelatin, cellulose, carbohydrate, starch, glycerin, water, rice hulls, glycol, molasses, calcium carbonate, whey, sucrose, dextrose, soybean oil, vegetable oil, sesame oil, and corn oil.

76. The method according to claim 71, wherein the first isolated Bacillus amyloliquefaciens strain comprises strain ELA191024 deposited with ATCC under patent deposit number PTA-126784 or strain ELA191006 deposited with ATCC under patent deposit number PTA-127065, and the second isolated Bacillus amyloliquefaciens strain comprises strain ELA191036 deposited with ATCC under patent deposit number PTA-126785 or strain ELA202071 deposited with ATCC under patent deposit number PTA-127064.

77. The A method of delivering a metabolite to the gut of an animal of claim 71, said method further comprising administering to an animal a composition comprising a first isolated Bacillus subtilis strain comprising SEQ ID NO: 257 or comprising nucleic acid encoding one or more of SEQ ID NOs: 285-305; and a carrier suitable for animal administration;
wherein metabolite comprises at least one of: N-carbamoylserine, beta-citrylglutamate, N6-methyllysine, N6,N6-dimethyllysine, N6,N6,N6-trimethyllysine, saccharopine, cadaverine, N-succinyl-phenylalanine, 2-hydroxyphenylacetate, 3-(4-hydroxyphenyl)lactate (HPLA), N-acetyltryptophan, indolelactate, N-acetylleucine, 4-methyl-2-oxopentanoate, homocitrulline, dimethylarginine (ADMA+SDMA), N-monomethylarginine, guanidinoacetate, N(1)-acetylspermine, glucose 6-phosphate, Isobar: hexose diphosphates, ribitol, arabonate/xylonate, ribulonate/xylulonate/lyxonate, fructose, galactonate, isocitric lactone, fumarate, malate, 3-hydroxyhexanoate, 5-hydroxyhexanoate, myo-inositol, chiro-inositol glycerophosphoethanolamine, glycerophosphoinositol, 3-hydroxy-3-methylglutarate, Mevalonate, 5-aminoimidazole-4-carboxamide, 2′-AMP, 2′-O-methyladenosine, N6-succinyladenosine, guanosine 2′-monophosphate (2′-GMP), 2′-O-methyluridine, uridine 2′-monophosphate (2′-UMP), 5-methylcytosine, pantoate, pantothenate (Vitamin B5), glucarate (saccharate), hippurate, histidinol, homocitrate, pyrraline, 2-keto-3-deoxy-gluconate, pentose acid, N,N-dimethylalanine, Isobar: hexose diphosphates, 2-methylcitrate, and (3′-5′)-adenylylguanosine.

78. (canceled)

79. (canceled)

80. (canceled)

81. The method according to claim 77, wherein the first isolated Bacillus amyloliquefaciens strain comprises strain ELA191024 deposited with ATCC under patent deposit number PTA-126784 or strain ELA191006 deposited with ATCC under patent deposit number PTA-127065, the second isolated Bacillus amyloliquefaciens strain comprises strain ELA191036 deposited with ATCC under patent deposit number PTA-126785 or strain ELA202071 deposited with ATCC under patent deposit number PTA-127064, and the first isolated Bacillus subtilis strain comprises strain ELA191105 deposited with ATCC under patent deposit number PTA-126786.

82. A feed additive comprising a composition of claim 1.

83. The feed additive of claim 82, wherein the Bacillus amyloliquefaciens and Bacillus subtilis strains are in the spore form or are lyophilized or otherwise dried spores.

84. The feed additive of claim 82, wherein the first isolated Bacillus amyloliquefaciens strain comprises strain ELA191024 deposited with ATCC under patent deposit number PTA-126784 or strain ELA191006 deposited with ATCC under patent deposit number PTA-127065, the second isolated Bacillus amyloliquefaciens strain comprises strain ELA191036 deposited with ATCC under patent deposit number PTA-126785 or strain ELA202071 deposited with ATCC under patent deposit number PTA-127064, and the first isolated Bacillus subtilis strain comprises strain ELA191105 deposited with ATCC under patent deposit number PTA-126786.

The application's sequence listing, which the Patent Office published only in electronic form, follows.

SEQUENCE LISTING (305 sequences)

SEQ ID NO: 1 - DNA, 1000000 bp, Bacillus amyloliquefaciens
catcatatactgggccgtcgggagtaacgatattgactttaacggtcttcatgcttttaccctcctaggaccagattaaacttctacacccatctcttttgcattctcaatgacttcttcaatgcgtcccacaagacggaatgcatcttccggaagatggtcatatttaccggaaaggatttctttaaagcctcgtaccgtttctttaacaggcacgtaagaacccttttgtcccgtaaactgctcagctacgtggaagttttgagaaaggaagaactggatacggcgtgcgcggtgaacgacaagcttgtcttcttcacctaattcgtccataccgagaatcgcgataatatcctgaagttctttgtaacgctgaagcgttgactgaacttcacgcgccaccgcataatgctcttctccgacaatttccggagcaagcgcgcggaagtggaagccagcggatcaaccgcagggtagatacccatttcagttaatttacgctcaaggttagtcgttgcatccaagtgagcgaacgttgtcgccggagccgggtcagtgtagtcatcggcaggcacgtagatcgcctggatagatgtaactgaaccaacgtttgtagacgtaatacgctcttgaagctgacccatttctgtcgcaagcgtcggctgataaccaaccgcagaaggcatacggccgagaagcgcggaaacctctgaacccgcttgtgtgaaacggaaaatgttatcgataaagaacagtacgtcctgtccttgtttatcacggaaatgctcagccattgtaagacccgtcagtgctacacgcatacgtgcgcccggcggctcgttcatctgtccgaagaccatggctgttttcttgataacgcctgaatcgctcattcgtagaaaaggtcgttcccttcacgagtacgctctcctacaccggcgaatacggaaataccgccgtgctcttgcgcgatgttgttgattaattcctggattaatacggttttacctacgccggcgccgccgaacaatccgattttaccgcccttgatgtaaggagcgagcaggtcaacaaccttaatccccgtttcaagaatttcaacctcagttgaaagctcatcgaatgaaggagctgatctgtggatcgggtccttttgagcatccgcaggcagcggttcatttaaatcaattttatctcccagtacgttaaatacgcgtccgagagtcacatcaccgactggaacggaaatcggcgcacctgtatcaacggcttccattccgcgctgaattccgtccgtagatgccatggcaattgtacggactgtatcatcgcctaaatgaagagcaacctctagcgttaggtcgatgcctacttcattttcgcctgtagctggctgtgaaactttaatcgcattataaatcgcaggcaagtggccgtcctcgaaacgtacgtcgacaaccggtccaagcacctgacttacgcgtcctttcttcatcgctatccctcctgacaaaatctttctattctaaagcggctgcaccgccgacaatttcggtaatttcttgtgtaatcgccgcttgacgcgcgcggttatatgaaagcgaaagtgaatcaatgagttctttcgcattatcagtcgcatttttcattgctgtcattctcgcagcgtgttcacttgctttactgtcaagaagcgcgccgtaaattaagctttccgcatattgaggaagcagcacttcgagcacctcttcttcatccggttcgaactcgtaagaagccgtgcgcttcccgccgctcgttccgaaatccgttaaaggcagcacttttttctccgtcacttcctgtgaaatcgcactgacgaaatggttatacaccaaatgcagttcatcaaaagcgccgtcgataaacatttgaaccgtctgacgggtcaaatctttaatctgagcaaaagtgacctcgtcgccaagccccactaactcagacaaaatcggcatctcccgttttttgaagaaatcgcggccgactctgccgattgcaatcaccgtgtattcatctttagactgatggcgttcttgaatggtgcggtaagcgtttcgcaaaaccgaactgttaaacgcacccgcaagcccgcggtcagacgtaatgacgagatacgccgtctttttcacttctcttgagacaagcatcgggtgtttcgcgtttttcgcgccttttccgacgttaaacacaacctcctggatctatccatatacggagcaaatgacttcgcgttggtttccgcacggttcagcttcgcagcggataccatctgcatggcttttgtaatctggcttgtttttttcgttgacgtgatccttgacttaatatcgcgtaatgaggccaaagatttcaccacctttattcttcatttgcgtaaaaagagagaaaagagaacctttttctctcatcttctaagggttagttgcttggtgcaaatgtgcgtttgaagccttcgattgcagctttgaagtcttcatcagcaggaaggtttcctgttttcgcaatgccgtcaagcagatctttatggttttgatcaaggtacatgtagtactcttcttcaaaacgtctgatatccgcaaccggaatatcatcaagatatccttttgtcagcgcataaagaatggctacctgtttttcaaccggaagcggcttattcaagtcttgcttcagcacttcaactgtacgcgcaccgcggttcaatttcgcctgagtcgcctggtcaagatcagatccgaattgggcgaatgcttcaagttcacggtatgaagcaaggtcaagacgcaatgttccagctacctttttcatcgctttgatttgggctgacccgccgacacgggatacggataatccggcattgatcgcaggacgcacgcctgagaagaatagatcggattgaaggaaaatctgtccgtcagtaatggaaatgacgtttgtcgggatataagcggagatatctcctgcttgtgtttcgacgaacggcagcgccgtaattgatcctgcgcctttagcgtcactcagcttggctgcgcgctcaagcagacgggagtgaagatagaatacatccccagggaatgcttcacggccggcggacggcgaagaagcaatgacagctcacggtaagcggccgcttgtttggaaatcatcatatacgacgagaacgtgcttgccgttgtacatgaattcttcacccattgtcacccctgcatacggtgcaaggtaaagaagcggagccggctgtgaagcggatgccgtcacgacaatcgtgtaatcaagcgcgccgtgcttacgaagtgtttccaccacgccgcgtactgtagattctttttggccgatcgctacgtacacacagatcatgtcttgatctttttggtttaagattgtatcaatcgcaacagatgttttacctgtctgacgatccccgataatcagttcacgctgtccgcggccgatcggaattaacgcgtcgatcgctttgatacccgtttgcagcggctcatgtaccgatttacggtccattacgcctggagcctggctttcgatcgacgtgttttgcttgtcagaatcggacccagtccgtctaccggctgtccgagcgggttgacgatacgtccgattaattcttcacctacaggaacttccatgatgcggcccgttcttttgacctcatcaccttcgcggatatctctgtaaggtcctaagataacgatacctacgttggattcttcaaggttttgagccatacccaaaacgccgtttgaaaactcaacaagttcaccggccatacaattgtcaaggccgtgtacacgcgcaataccgtctccgacttggatgactgtacctacgtcatgaacttcaatttcagattggtaattttgaatttgctgctttatcagcgtgctaatctcttcagctttgatgctcacttaggtttcaccccttctatcgatttccccggcaagttgacgttccatgcgctcaagctttccgcttacgcttccgtcataatccggtttccaatgcggactttaatgccgcctattaaatccgtctgcacttcatttctgattctgagcgaagcgattccggctttttttgcaaacacttgagacaatgataacatttccgcttctgaaagcggctttactgaataaacaaccgcgtcctctgtctgacgggcctgattggcaagtttgataaactcgtctgtgagatcaggcacaatcgaagaccggcggcggtcaatcagaagaaaaatcgtatgcagcacagactcagacagtgcgccgaacgattgctgaatcagctctttttcttagcggccgataccttcggatggcttagcacttcctgtaatccggcttcgtttcggaacacttctttagtacggtaagctcttcttcgatttcattgatttgagaagtctcaacggcaatgtcgaaaagcgctgacgcgtatcgtttagagacagcagatccactcatcggctttctcctacctctttaagatagtcctgaatcagttgttcctgggcttgttcatcaagctctttttcaatcactttcgatgcgattaagacagaaagtgatgcgacttgctcgcgaagtgcggaaaccgcttgttctttttctttgacaatttcggttctcgccgcttctttcaatctttcagactcggcgcgtgcagcctggataatgtcttccttctgcttttcacccagttttttcgcattttcaatgagtgattgtgattcctgtttcgcttcttttaaaagaacgcgctgctcttcaatcagcttctgcgcttctttatttctttcttcagcggacgtaatttcgccggcgatatgatcttcacgctgtttcattatattttaatagcggtcccagagcgaatttcttgagaagcgctaataaaactaacatagctaacaattggaataggatatctccgccgttaaacgacagtcctaattcaagaggtaattgagacatctactacggcaactcccttctgcaggttttctctgctgataaaaagccgtttcgggacggcctgcttatcagacataaagcaatggcgaaggttctcttagagtgatcttcgccattttagttcatataaggcttttttgcttagccaaagaacgctaagaacgcgataacgacagcgataatcggaagggcctcaaccaatgcgatacccatgaacataagagttctaagttcttttcctgcttccggctgacgggcgattccctctaccgtacgtgaaacgatcagaccgttaccaatacctgcaccaagtgcacctaaaccgattgcaattgcagctgctattaaattcatgaaaaagttcctcctttaaaatgttatccgaatggatatatgattttaatgatcatgactgattttgtgtgacatgtacaccatcgtcagcatcgtaaagataaatgcctggatggtaccgatgaacaagctgaatgcctgccatgcaagcatcggaataatggctccgactgtgccgaccaaccgagaaagaaactgtttgagtagaaattcgtcgccagattcgcaagcaggccaagaagaatttcccggcgaaaatttaccgtaaagacgaagtccgagtgtcagcgtattcgcaaactcctcaatgatcttcatcgggaacataagcggaaccggtctgaggtaatccttagagtattccttcaaacctttcatcttcacgccgtaatagtgcgttaacgacacaaccataacggctagagtcagagtaatagccggatcagccgtcggtgatttccaccaaagctcgtgtccgaccgttacagaaaacggcagccctagcatattgatacaaatatgtaatcagcaggttacaccaagcgccaagaagttagcccctgtttttaaatccattgtactgcctataatattgcggacaaatcaacaatccattccatgaagttctgggcttttcccggacggatggacagcgttcttgtagtaagaatcgcaatcagcagcacaatcacacttgccacagtaatcatcagaatgtttgtcagattaaaagtaagaccaaacaaatcaatagttctgtaatcgtgattcaatgggttttcacctctcttccattgatgaacgtttgagctgataatggaatctatcataatgacgggataaattgtcattaatccaataatcacacttgccacactgactttatcgggatatttaaaggcgacagccatcgcaagtatcgcattgcaccaacgcgctgcgctcccgagtgatcgtatggactttcctttcgccacggccttgtcaaaagcattcattcttctggtcaagagccacaaattaaacaaactgaaaacagttccaaaaagaggcctaaaaaaacagttttatacgccgtaagaccatatcccagcaaatagattgctaagattacaaatacatatctccgttgtctgctgaatgtaagattgggatcgtccatcaactatctgtctcctgatgaaaatgtaatataattcctggatacggcaaaacatgcggttaacccttgcagaaggcttttttgtccgcaaaacggcctgttcgaaaaaaccactcatcctcctgatgctacgggatgctgtttcattcgcttagataaatcctcatataacgggtttttttggaggatttaaaatgaggatggatactagaaatgaaaggaatgaaaaccttctcataataccctcgtttagcatacaatagccctaacatgtgtcaatctgtttaaagttaaaaaactttttataccggagcatacacagaatgttcacaattcacctataaatgtatgacctctgccattcagctaaaatctggataaaaaaagaaaacccctgaatgaggttttccgatttatttggttccgtacagtctgtcaccgcgtcaccgaggcccggaacgatatagcctttttcattcagtttttcatcaagggcggcgatataaatatcaacgtcagaatgatgtttctgcagctcttccacgccttccggagccgctacaagacacataaaacgaatgtttctcgcgccgcgctttttcaggctgttgatcgcttccaccgcagagcctcccgtagcaagcatcggatccacgacaataaattcgcgttcttctacatcagaaggaagcttgacatagtattccaccggttttaaggtttccggatcacggtataatccgacatgtcccactttagcggccgggattaatttcagcatgccgtcaaccattccgagacccgctctcaggatcggcacgataccgagtttcttccctgaaatcactttggatgtcgctgtttgaacaggtgtttcacttccacttctttaagaggaagatcacgtgtaatttcaaacgccatcagtgatgcgacttcatccacaaggtctctgaaatcctttgtgcctgtattttcattccgaatatatgtcagcttatgctggattaaaggatgatcaaatacgtaaacctttcccatactgtgttcagctcctttttgttgtccgagtgactttttcacacttctattgattctacagaaaaagacaaacagtttcaagaaaatcataaaaaaacccgccggattaaggttccggcgggtttcttccttattaatagtccagttctttatataaaggaaacttttcagtcaaggcagatacgcgctgtttcgcttcttcaagttttgcttcgtcttcatgattttcagcgcgaggccgatgatggcgccgacttcttcaagcgcgtcaccgtcaaagccgcggcttgtcacagccgccgtaccgagacggattccgcttgtgacgaacggtttttccggatcgtaagggatcgcgtttttattagatgtaatgccgatttcatcaagaacgtgttcagcgacttttccggtcagtccgagagaacggaggtcgacaagcacaaggtggttatccgttccgcctgatacgagctgaataccctctttgttcagagactcagccaggcgcttcgcgttcgagatgacgttttgcgcatatgttttgaaatcatcttcaagcacttctccgaaagaaacggcttttgccgcgatgacatgcataagcggtccgccttggattcccgggaaaatggatttatcaatcttcttgccgaactcttcacggcaaaggatcattcctccgcggggtccgcgaagtgttttgtgagtcgttgtcgttacaaagtcagcgtaaggaaccggattcggatgaaggccggctgcgacaagacccgcgatatgcgccatgtctaccatgaagtaagcgccgacttcatcagcgatttcacggaattttttaaagtcgatcgtgcgggggtatgcgctcgctccggcaacgatgagtttcggcttatgcgccagcgctttttcacgcacatcttcataatctatatattgcgtgtctttatcgacaccgtattctacaaagttgtattgaacgccgctgaaattaaccgggcttccgtgtgttaagtggccgccgtgggagaggttcatcccgagcaccgtgtcgccgtgctctaaaatcgtgaagtaaacagccatgttcgcctgagcgcctgagtgcggctgaacgtttacatgctcagctccgaaaatctctttcgcgcggtcgcgggcgatgtcctcaacgacatcaacatgctcacagccgccgtagtagcgtttgccgggtagccttcagcatatttgtttgttaaaacagagccttgtgcttccattaccgcttccgtcacgaagttttcagaagcaattaattcgatcttagtctgttgacgcttacgctcatctttgatggcgttaaacacttgtttatcttgtacaggtaaatgtttcatcagcgagatcctctcctatccgtttcctgttctttatttttaccaccttattgtacatggtttttcaggtgaatgtaacagcttatttaaaaaaatcacaaaatttaattagaaaacacgaacattatagaggaaaagtattttcatcattcgcattcatatacggcgcgaattccgcctatcagcttcggtcttgtccgggccatcgtcacatgtgcttctccaagctcacggctcgatatccggacagggacggcaacgggtttcagatgcatgccgatgaacgtatcaccgatgtcaatcccggcgtcagcctgaatcgattcagcgagcactggagaacgcatctgccggtatgcataagaggccatcgctccgcccgctttcgggacggggacggctgaaacaatggggagcctgaaccgctcggccgtttccgcttcaatgacaagcgccctgtttaaatgctcgcagcattgaaaagcaagatgcacacccgttttttccttaaaccggttaagtccgccgtatatcaattcagcccaatccccgcttccggcggtgccgatccggcttccggcggcttcacttgtactgcacccgaccaccagcagactgccgtccgtcagtcctgcctgctcttgaaactcagtcagcatgtccgtccatttttgcttcatctcttccattgtccagcacctcttacagatttttttcttcgtaatctgcgattttgccgatccgccgttcgtggcggccgcccgtaaattcagtcgtcagccagacttttgcgatttcgcgcgccagccccgggccgatgacgcgttcgcccatcgcaagaacattcgtgtcattgtgttcacgcgtcgcttttgcgctgaaggtgtcatgggcaagcgcacagcgtatgcctttaccttatttgcggagatgctcatgccgatgcctgtgccgcaaattaaaattcccctgtcagcttcgccgttcaccactttttccgctaccggaaaagcgtagtctgaataatcgacagagccggcgccgcattcacagccatatcaatgtattcaatctgcaattcatccaaaagactttttatttcttcgcggatatggacgccgccgtgatctgacgcaatagctactttcattcatttacctcctaggtgtggctgggcgaagacagcccagtgtgcttgtcctttttattacgaaatccgttgatttcattctactctttcacattcgttttgcaaatgacctgtttgcagattttctgacagattacttgcttttcccgtcaagcaattgatcagccaaaagggtcagcagctcctccagttcgtcccgcgtctgtttataaacatcaagcggaccgccgaacgggtcagagatatcgccgctttcccccgtcacgtattctttaatggtaaaaactttgccctgactgttttgatatcggccttcaatcagctgtttatgctgttcggtcatcgccagcaccagatcggccgtctcgatatgttcttccgataagggagatgaactgtgattgagggcgatccgtttttcaaacagcgcttctacggcatgagccgacgcttttccgtgcggagacgcgaatacgccggccgagcttacgctgacatccagccctttcgtttctgctatggatttaaaaagagcctcagccatgggactgcggcacgtattgcctgtacaaacaaagattattttcatgtccgtcacctcttactacctattataaatgaagaaaaagaaacggcatcttcgtttctttttttacgtatcttatatcggtaaaagcagtttcagcccgaatccgatcaaaatggctccgccaagcgcttcgctgtaggagccgagccatgactgcacctttcttcccgccaaaaggcccgcccatgttaaaacggtgctgaagaccccgaacagcgtaacggccagaaacggattggagccgttcatcccgagactgagcccgacagaaaagctgtccagactgacaccgaccgcaaacagcaacagtcccgagcctgccggagatatgagcggcccgtccgattgtttaaacgcggcgatcatcatctgcacccctaaaatgaaaagaagagatccgccgatgtaaacggcgagcatcccagaaaaccggacagcagatgcccggccgccattcctacaagcggcatcatgacatgaaacagcccgatgacaacccctatatgaaaaatctgttttttcttcagctgaatcattcccattccgagcccgacggaaaaggcatccgtcccaaagcaaatgccatgatgcttaaggagacaagttccccgatgaatagattcgacatgaataaaaaccccttggacgtgcccgcttgtttagcttatgcatgtccgataaggggtagaacaagttaatggataacggtgccgcctgcggctttcatcagcctgttcataacggcgagccccactccggtatccggaaaggactcagaaataatcatatccacttccgcttcatcaaagctgcggagcgcatcgtataaggcggacgccactgtttcaaggtcggcgcgtctgccgcagaccttgatataatcagcctggtaactatcggcgttctcttctgttgtcaaaatgccgattcgttttccccggcttttatatgcgtctgccagttcttgaattctccgggcgccgccgtcggcaatagccatcggcgcagaaggcgcgtaatgtgtatatttcataccgggagaaataggaacctcatcttcttcggtcagtcctttatccacaagaaccggaccggcggcggattcaatctgctcttttgtcacgccgcccggacgaagcagcacgggctgtttccccgtacaggacagaacggttgattccactccgattcccgtcgcgccgccgtccacaataccggcaatacggccgtttaaatcatgagctacatgctcggccttcgtcgggctcggttttcctgataaattggcgctcggcgcggcgatcggcagtccggccgagctgatgagggctaatgctgccggatgatcaggcattctgaccgctaccgtctccagtcccgcggtgacacggggtgacagcacaccgggcttacacggcaggacaagggtcagcgcccccggccagaatagctccataagctttttcgccgtctcaggaatatggctgataaaacgatcaagctggctgatatgggatatatgcacaatcagcgggttatcgctcggccttcctttcgcctcatatattttcgttacggcttccgtattttcagcgttagcgcccagtccgtaaacggtttctgtcggaaaagccacaacctcattctgccggagcaattccgcggcttgtgtaatttggggatcggttgtggataattctgcggaacaatccacaaaccatcttcttgttttcatgtataaccaaactccttattttaaagcggtaaaactttattttctctcgtgtattccttttgaaagtataaaagatgtcctttaataaaacaagcgttatccacaaactgtggacaacactttttaataagtggataaccttgtgtataagttagatcaggcagaggttttcaccattaaaaacgaaccttctgtgcataacgagttgcggaaatgttcggacgtatacagttcctcaggcgcatcggcgcacgcttcaaatcccatcacattcagaaactcagcagatgagggctgattggcgactaagtagacatcttgaatttcatgttttttgcacagcacatccatactttgaaacagtgtaacgatatggctttgattcagcctgtccgacatgacgagtgaacggagaagcccttttccgccgctgaatttttcgatcccgagacaggcggcaatctttttttcgctgtcttccagcacgataaaccggctgatctgctgatcgatttccgcatgtgccgtatcagactttttcaaaaaggcctccagcgcctccgtatcttgatctcttgccactctcagctgataaaacatatatttccctccgtttcgatcaactctttcttccaatctatgaatcgaatccggatttatgccttttgcttcaggaaaatagatctgaaatccaatcgacgaggaaaaacttcacttcggtatcatcgtcatctttattttctttcttcgctttatcggcctttgcttttacgtcatccagcactttttctgtctgtttctgcgtttcttcctgcttctgtccgccgtcttcctgatctttcaccgcttcgccgtttgagaaatcaaggaagcacagcggcggaaacaagacgcaccaccagttggcgccctcgccattgccgagtgtaattaaaatggcttcatattttccggccggatagaccatattgccgtacagctttgtcggaaacgagattttattgaattgaactgaaacggattgatgcgcacccttttctttcatcgtttgtttggcgatttctttaatttcaggaagcttcgaacgaatgagccgccgcgcttcttcaatggaagtgatatctttcacccagtccgtgatttgcttgtttacagcatctctgatctggcgcttgagcttttgatcctcatcgttatcactgttggccaaaatcctgagccggatcgcttcatccggtatgacgacgggctcatcggctgatgcccgcgccgtttcttcttttgtcaaacccgcaagcgctcctgataataaaagaaaaatatatatgcagatcatcattgtctgtttcatcggtccccaccgttcctctccgtgctttttttatctagtcccattatggacatgacggaaaaggtttaaaccggcgggaagaaaaaaatctagcaagctgataatctgcattgacagattcaaaatatggtacgatattattttgataggaggttttcagatgaaatataattacaccgtgctgctgtcggcggcatgtatgtctgtcatttattctattttgtatgttcatcaattcattatcgcggctttcatttcgatggcgttttattttttgtttccttatttgatttttgcgctgccgcttcaatactttctgaataaaaagccgaagagatttcatccgctgtattttctttattatttgggggtgtcgttcattgcaaacgggatcatcttcggtcttttgcagccgtcaggccaatctctgttttctaattcagccttttatatctttgcggttttaacagccgtcgtctattgggtatgggattccgtattgctgcaaagacaaaatccggctacagaagcgtaatcagcagacagccggctgaagggagagcggcgcaaaagaaaacggcggccatctttaaacgggcgcgccgtccttcttctgtttcagaatgataattggcccgctgctccgctccgcttacggccagcccggaaacgatgaccgctgcgacgataagaacagccgtaacggcgccgagaatgatgtcaaagccaaacggcaggacaaatccagccgcataagctgcggcggcgagtatacatccgaaggcgaacgcttttttcaaggcggatgcccctttcattttctttccattgtaacaaaagcccgccgtgtgcgtcaccggcgggcttttttcatgatgtgatgaccgcggatacggttctgtcttttccgttgatgtcctgtacgacttccacttccgcattcggaaaggaatgacggaacaggtctttcacggcttttccctgattatatccgatttcaaagacgacaagcgctttatctttcatgacaagaggcagctcctccataaaccgcttgtagaatttcaaaccgtcaccgccgtccgtaagtgcatgaagcggctcatggaaacggacgatatccgacaaatccgccatttcttcttcagaaatatacggcggattggaaacaataatatccgcttttattcctgatgaaataaaaggagttaacagatctccctgcaaaaagcggacgtccgctccgaggttttgcgcatttctttccgccacctgaagcgcttcttttgaaatgtccgaagccgatactgaaaaatgtccgcattcaagcgcgagcgtcaccgcaatggctccgctccccgtaccgatatcaatgacgttcaggcgttctccctcagaaaacacccgcttctgtctgtccagcagatgaaagacgacttcttccgtttccggacgcggaatgagaacatcgtcattcacaaagaattctctgccgtaaaactgttctttcccgataatatattgaatcggaacgccttctttatgcatttccacatgccgtctgaatcggtaaagctcgtcctcgccgacgggctcctgcagacttgcgagaagcttgctccgatccattccggtatcatttaacagcagcagctcggccgcgtttttttctcttcccgcttcggttaaataagaagaagcccagcttagggcttcaaaaacggtcttcatcttaattttccgcctgctggagcttgcttgactggtcttctacgattaacgcttcaaccacttcatcaagcttgccttccaggatttgatccagcttttgaatcgtcaggccgatacggtgatccgtcacacggttttgcgggaaattgtatgtgcggatacgctcggaacggtcgcctgatccgacggctgatttacgggtctgatcatattcagcctgagcttcctgctggaatttgtcatagattctggcgcggagcaccttcatcgctttttctttatttttaatctgagatttttcatcctgacaggatacgacgacaccggtcggtaaatgcgtcaggcgtacggccgacatcgtcgtatttacgctttgtccgcccggtccgcttgatgcgaatgtatcgacgcggatgtctttttcgtggatgtccacttctacttcttccgcttcaggaagacacgccaccgtcgccgtggatgtatgaatacggccgcctgattccgtttccggcacacgctgtacgcggtgcgcgccattttcatacttcagcttggagtatgcgccttttcccgtaatcataaagatgatttctttgtaaccgcccgttccggtcacgtttgcttccatgacttcagtcttccagccttggatttcagcgtaacgggagtacattctgtagagatttcccgcaaacagcgcggcttcttctcctcccgctgctccgcggatctccatgattacgtttttgtcatcgttcgggtctttcgggatgaggagcactttcaaacgctctgataaggtttccgtctctccctgcagttcggagatttcttccttcaccatttctctcatatcggcatcaagcttttcctcaagcatcgctttcgcatcggcaagctgttctgatgcgtctctgtattgtctatagacttcaacggtttcttgtatatcagattgctctttcgaatattctctaagctttttcggatcgttgaccacttccggatcacttaaaagctcatttaatttttcgtatcgttgttcaattgactgtaaacggtctaacacggtcttcacctctgttttcctgtgcgtaacattctcattatagtatagggcttatcaccagtcaaaagcaattcgcctctgttatactgaagcaaaaaaggaggggcggatatgctgaaatccatccaccatatagcaatcatatgctctgattatgaaaagtcgaaagctttttacaccgagatactcggtttcggcattataaaagaaacataccgaaaggaacgggaatcttataaactcgatctggcgctggacggcgcgtatgcgattgaattgttttcctttcccgatccgcccgaacggccgaccagaccggaagccgcgggtctccggcatctcgccttcaccgtaaacgatcttgaagcagccgtcagggagttaaagaaaaagggcgtcggcacagaaccgatcagaaccgatccgctgacggggaaacggtttacctttttcttcgatcccgacaagcttccgcttgaattgtatgaagcgtaacgttttttgaagaaatgccgctttctttggcgaattccttcttgttttgtctaacatgaagggaacgccgcctcatggtcgaatacctagcaaaaaggaggtatgtgatcatgaatacaaacatggccgcgaaagagctcggcgtctccgcaaaaacggtgcaaaggtgggtcaagcagctgaatcttccggctgaacggaatgagctcggacattattcctttacacctgaggatcttgatgtgctgaaatcggtcaaacggcaaatttctgaaggcactgcccttctggacgttcaagtgccccggcagccgaaaaaacggacgggcttcattttgcagcgtccgaaaatcaatggcggcgctgaacaaaggttggcagagctggagcgcaaactggacattctcacgaaagagaaacaggatgagaaccatctgctttcaaggatagaggagcttgaacgccagctgaaacaaaaggcggatgaaggggtgtcttatcagcttcttcagcacagacgggaaattgacgacctcaataccgaattgcagacattggcctcccgcatccaggaacttgcccagacagctcccctctcagaaacagccgcttcttcagaacataagaaacccagaaaaaaaacgagattttcgccttttaaatttcaattctaatcaaaaaagctccctgaaacagggagcttttcattatgcagtcagcgcaatgatgatcggcagtgagataagagataaaatcgcactgatcacgaacgcggacgcagtttcttcctcttgtttttcgaaacgtgtggcaatcatcgccgctaccgcagatccagggaatgcgacgagcaataccgctttagtgatctggtcagccggaagtccgactgcaagagcgatcaagtacatcagcgcaggctgaacggcaacttttaacaaagcgataccgaaagccggcagactgagcttgatgttgcggataccgacagttacaccgacggcaaagagtgcaacacctgatgttgtgcttccgagctgatcaagcattttttcacccaagccagggagtgttacaccgcagagtaccaggatgatactgataagcggtgcagccgcaagcggttcggaaagaccgtgaagaatagacttaccagtcattttccagaagttctcgttttcgctgtcttgtttcttagatgactcaccgactgtagcgataatgatcgcaagcgggtcaaggatggcgttaaccacgatacccgtaacggcgataggaatcgctacttcgtttgctccgaataagcttccgagtaccggaatacccataaatgcaaatgtcggctgtgcagagtttaaagaaaatacagatgaattcgttaaatcatacttgaagataaatttgcaaaccaacaaaatgacgataaagaatccgacaatcccaatgatcaaagcgatcattaaaggaacctgtgataaaaacgcacttcttgaagtggttaaaatacttgcgataaaatgcgccggaagcgcgtacttcgtaactaaggtgcttaccccttttgctgacttcgcgtcataacttccgaagcgacctgcgaaccatcccagcacgatcacgaaaaagatcggcgccaggaggattaaaatatctaagaagctcaaaatattctcctccaaatccttaatgtccgtatactttagcctttacataaaagctttccctcggactgtaaaattaatcgtaaaaattatttagcgataacttgtttatattgcggtttccacattgcatcaagaacggcttgttctacattctcaggaatgcggtttgccacgccttctttaatggcagtttccgctacggcgatcgcaactttaattgaaacttcttgtaagtcgctcatgctcggcagaaggcctgcacccggtgtttcaaaatcaacgctttctgcgattgcgtcagcagttgccgcaaacattgcaggagtaatcactttcgcttctacaacgattgaaccgagaccaagtccagggaacgcgaatgcgttgttagattgtccgatttcatgagaaacgccattgtactctacattgtcaaacgggcttcctgtcgccacaagcactttgccgtcagtccatttgaatagatcgctaggaacggcttcagcaagcggtgtcgggttagacatcggcatgatgaccggacgctcaacgtgttttgccatttctttgacgatttcttcactgaacgcgccgctttggcctgatgtaccgattaagattgtcggtttcgcttgacggatcacttcaatgaaaggaatttgtccgttttcatcgcgtttccaatctttaatttcttcagctgtgcgcaggtacggctcttggaaatcaagaatgttttccataccttcaattaacaagcctctgtagtccattgtgtagaacgctttgttggcttcttcttcagaaagaccggcaagcaccatagtgtcgcggatttggtcagcgattccgattccggcagatcccgcaccgaagacaaccacacgctggtctttaatagacgcgcctgttttcttcatagccgcaagcacacctgcaagcgtaatcgcgcctgttccttgaatgtcatcgttgaatgtaagaatttcatgattgtatttcttcatgatattgcgcgcgtttttgtttccaaggtcttcccagtgaagaagagctttagggaaatatttaagcgcagcttttacataagcgtcaatgaaagcttcataacgttcgccttggatacgttcatggcggttaccgatgtataaaggatcgttcagaagtttttcgttgttcgtaccgacgtcaagaacgacaggaataacacggcttgggtcaataccggcagcagctgtgtatacggctaatttaccgatggcgatgttgataccgcctacaccccagtcaccgattccgaggatgctttctgagtctgtcgcaacgatcagatcaatatctccggcagtggcatgaaggttttcaaatgcctcttcgattccttctacattgtcgatagaaaggtaaatcccttgaggtcttctgtactcatggctgtattcttgaatcgcttcaccgacagtcggtgtgtaaacaaccggcagcatttcacgaagatggttttgaagcaatttaaagaaaagaacttcgttacggttttgcaaatcattcaaatacacgttttggcgaaggcggtccggctgagcttgaaactgctcgtatgcgcgttttgcctgctcatcaagagacagaatggtcggaggaagcagcccgtctaatccaaggctttttctttcttctgctgaaaacgcaacacctttatttaaagtagggatagatagaacttcttttcctcttaaagtagtttctaagttgccttccttcgttactttaatattattcaagaaaatctccttctttcttcaaatagttaacaaagttaagtaattacccattttggctagtgtgatcgcgatctgctatatctttttttgacaattattcgaacaatgtctcataactatttacattacttagtcattttatgcctgtaaaaatgaaaattcaagagatgaaaattacttaattttttcatactcttttttaagttaattaactacaatttttgaaaaaccgtcaaaaaaacaccggattttttaccgatgttttcatgaaaagggttatttatcagtctgttttttcagcacttcgtggtgatgtctgcatctcgcttcgtatgactccgacgcgccgactaaaatgaccggatcatcataggaagcgggcttcccgtcaatcaaacgctgcgtacggcttgccggcgacccgcaaacggagcagaccgcctgcagcttcgtcactgattcggcaaccgccatcagattcggcaccacaccgaacggctctccccggaaatccatatcaagtccggccgcgatgacacgatagcctttatccgcaagcaaggataaatcgccgatgattgattcgccgaaaaactgcacttcatctaccgcgatgacgtccgtgctttcactgatatgatcccatatttcagccgaagacgagatgacgtggcttgtcatggatgtgccgttgtgagaaacgacagcctcctcactgtagcgattatcaatggcaggtttgaacaccttgacctcctgcttcgcatatgtcgctcttttcactctgcggatcagctcttctgatttcccagagaacatgctgccgcatatcagctcaagccatccgctttgcttcattatgtacataggctatccgctcccctttttttcctgtttatggacataaaaaacaggcaagaagcaattcttgcctgcctgtaaaatctattattacttaagaccgtattttttgttaaagcgatcaacacgaccatcagcagaagcgaatttttgacgtccagtgtagaatgggtggcattcagagcaaatctcaacgcgtacctcttcttttactgagcctgtttcaaattcatttccgcaagcgcatttaactgttgcttttttgaaattaggatgaattcctgctttcattgtatccatctccttccgccctgaatcccgtgtggaaacagagttattattccggagcgaatccggaacgcatatgagagaattatatcagtcatttactgcatttgcaaatacattttttatcagcggcgggctgatgatgaaaggtttgcctgcttccattcttggttgatcagatcgaagaattcctgattcgtttttgtttttttcatttttctcataaacttctctgcgaagtccggagaatcagacatcgatttgcggatcgcccatagacggtcaagatgctctttcggcacgagcagctcttccttccgcgtgccggagcggcggatatcgatcgccgggaaaatccgtctttccgcaagagaacggtcaaggtgaagctccatgttgcccgttcctttaaactcttcatagatgacgtcatccatccgggagcccgtgtctacgagcgccgtcgccaaaatggtcaggctgccgccctcttcaatgtttctcgcggcaccgaaaaagcgcttcggacgatggaacgcagccgggtcaatcccgccggaaagcgtacgtccgcttggcgggataacgaggttgtaggcccgtgccaggcgggtaatgctgtccatcagaatgataacgtcttttttgtgttcaacgagacgcatcgcccgttcaagcacaagctccgctaccttaatgtgattttccggcacttcatcgaacgtcgagctgacgacatcgcccgctacggaacgttcaatatccgttacttcttccggtctttcatcaattaagagcacgatcaattcagcgtcaggctgatttgtcgtaatgctgttagcgatttcttttaacagcatggttttaccggctttcggcggcgccacgatcagaccgcgctggccgaaaccgacgggagccatcatatcgagaattcttgttgagagatagttcggtttcgtctcaagcaccatttggcggtccggataaagcggagtcagcgcaggaaaatgaacgcgctctttcgcagattccggatcgtctccatttaccgcttcaacgtgcaaaagtccgtaatagcgttcgttttctttcggcggacgcaccttgccggatactttgtcaccgtttcttaaatcaaagcggcggatctgggaagcagaaatgtagatgtcttctgagcttggcgagtaattaatcggtctgaggaagccgaatccttccgattggatgatttcgagcacgccttccataaacagaagatcctcctgctcggcgttggctttcaggatggcaaagattaattcttttttagtcagtttgctgtagtaggagattttataatgtctggccagttcatatagttcttttaatttcatattttccaaagaggaaatagatacgtctttcataaaaacaccacgcttttcatagtcaatgtattgctgttttcattcaaatcggctgcttcgcatgattccgccaaagcacattcttttataaaacgttcaggaacttctatcggtaacacttccacccatgatcggcgcttttttaaaaaaggaatgtcttaatgagttttgaaggaagcgaggacaaaaacttgagaagatcaatatttatatcgtctgtatgcggtagaatttgaaaatttcccagtactcaaaagaaggaatgacacagaaaaatcgcagcactctttatttttacctcatttcaaaaaattattcaacttaaataatgctttgacatataaatgatagggttgactcttttttgcaaaagaaaagcgggactttccgtcccgcttttctctatttatggccggatcacaagatttggttttttcttcaggctgtgtcttccgtcaacgaatcggaccgttcctgatttcgcccggatgaccaggctttcagtcgtgccgacggagcctttgaactgaacgcctttcagcagctctccgtccgtgacacccgttgcggcaaaaatggcgtcatcccctctcacaaggtcctccatccggagcactttggatacatcaaggcccattcgctcacagcgggcctgctcttccgcactttgcggcagaagcctgccgatgatttcgccgccgagcgcttttaacgcaacggcagacagcacgccttcaggagccccgcctgaaccgaagagaatgtctactcccgtatggtcaaaggccgtattgatggcgcccgcgacatcaccgtcgttgatcagtttgattctggcgcccgcctcacgcaattcagagatgattttttcgtgtctgtcacgatttaaaatggttgccacgacatcttcaatgtctttgtttttcgctttcgcaacggcttttaagttatcaatgacaggcgcttcgatatcgatgcagcctaccgcttcgggaccgaccgcgattttttccatatacatatccggggcgttcagcaatgttccatggtcggcgaccgcgatcaccgtcagcgcattccagccgccgctcgctacgatgtttgtgccttcaagaggatcgacggcgacatcgacgcgcgggccgtatccgtttccaagcttttcgccgatgtaaagcatcggcgcttcatccatctcgccttccccgatcacgaccgtgcctttcatcggcaccgtgtcaaacacgtcacgcattgcgcttgtcgccgcatcatcagcttcatcttttttcccgcggcccatccatctggcagatgctaaagccgccgcttcagtgactcgaaccaattccatcgataagcttctttccatttcaacacgatctcctctcaaaagtccgcatttctatgaattttggagctgttctatctcttcgtccgtcagcctttgccgccagattgtggcgcccagaccttcgagttttttctcaagattgctgtagccgcggtctaaatgctcaagaccggtaatttcggttacgccgtcagccatgagcccggcgacgaccagacaagcgcctgcacgcagatcgctcgcctttacttttgcgccctgaagctcggccggaccggtgataatggccgacctgccttccactttcatattggccccatccgtctcagctcatcaatatgtttaaatcgggccgagtagatggtgtcggttacgacgctcgtgccgctggctctcgttaacagagatgtcatcggctgctgaagatcagtcgggaatcccgggtaaacaagcgttttcacgtcgaccggttttatctgcttctgcccgccgagcataagaagctgatcgtcactcgtctcaatgtaaaaacccatttccctgagcttcgccgttaaagactccaggtgagtcggtatgacattatcaataatgacttctttccccatcgcggcgccggcgatcataaaggtgcccgcctcaattctgtccggaatgatcgtatgcctgcatccgtgcagctcttttacgccgtcgattctgattacattggttcccgcacctttgatctttgcgcccatgctggtgagcaatgtggcaacatcaataatctcaggttccttggcggcgttttctatcacggttttaccttcagccagtacagcggcaagcatgatattaatcgtcgctccgacgctgacgacatctaaataaatccgtgcgcctctcagcctttcggcgcgcagataaatcgcgccttgttcattggtgacttccgctccaagcgcctcaaaccctttgatatgctggtcaatcggccgcggaccgagatggcatccgcccggcagtccgatgaccgcctgtttgaagcggccgagcatcgcgcccattaagtaataggaagcgcggagttttttcactttgccgttgggaagcggcatgctgatcatcggggaagggtcaacgaccatttctcctttttcaaaatggacgtttccgccgatttctttcagcaggtcacgcagcgtttcaatatctgagatctccggaagcccttcgatcgttacttcggaatttgccagaatggttgcgggtatcaatgcgacggcgctgtttttcgcaccgctgatatgtacggttccgtttaacggatcgccgccggcaatattcaacttttccatgatagtctccttccataagaagatagctgcggagcgtaaataaaatggcattttattctgtctctgcaaataaagctcttgtccaaaatgtagccaattcgaagagaaagaatacaaggacattataaaataacaggaagaaaatagcgaagctttgcggggcatttttaacacaggatgcacagaggcccgccgggttcatattccggggaaacacactcttcactttgatactgaaggcccgctgccaaacaggaaaacataagggtgcggcaaacggatgcaaccggtttgccgcccttttcccccttatttattccagtcagccaagaattgctcgatgcctttatccgttaacggatgtttcgtcagctggtgaatgactttcagcggcatcgtaccgatatgcgcaccgcgtaaagcggcttcagtcacgtgctgcgcatgacggatggaagctgcgatgatttgagtatcaatgtcatgaatgtcaaaaatctgtcttatttctgaaatcagttcaagaccgttatggccgatgtcatccagacggcctaagaacggagatacataagtcgccccggctcttgccgccaaaagcgcctggttggcgctgaaaatgagcgttacgtttgttttaatgttcaggtcgctcagcgcttttacggcttttaacccttcagacgtcatcgggattttcaccgtaatattcggcgcgattttcgcaagttctttaccttcttcaatcatttcttcagcattcagggaaatgacttccgcgcttactgatccgctcacgacttccgtaatctcacgaagtctgtcatggaaagacacgtcagcttctttcgccactaaactagggtttgtcgtaactccggcaagaacgccaagttcataagcttctttaatctcgtcaatgtttgctgtatcaatgaaaaataacataaggaaagcctccccagtaataaattttcagaactgtaaaacatgattgcgctttctaaaggtaagacataaaaccgcctgtcaatgctgtcaggcggtttatggatgttacattggattaagcttggtttgaagaaccgaactcacgcattttgccgataaccgtttctttgatcgcttcacgagcaggtccaagatatttacgaggatcgtattcgttcggcttagctgccaatgtttcgcggacagcttttgcagaagaaatttggttttcagtgtttacgttgattttagccgtaccaagtgagattgattttttaatgtcggcagtcggaattcctgtaccgccgtgaagtactaacggaaggccggttgatttgccgatatcttccatttctttgaaaccgaggttcggttcgcctttgtaagggccgtgaacagaacccagtgcaggtgcaaggcagtcgatgccagtgcgctctacaagttcttgacactctttagggtcagcatagattacgccttcagcgatcacgtcatcttcctgtccgcctacagttccaagctcagcttcaactgaaacgccgtggaaatgagcaagctcaaccactttagctgtagttgctacgttttcctcaaacggatggtgagatgcgtcgatcattacagaagtgaaacctgcatgaatcgctttcgcacaagattcaaagcttgaaccgtggtctaagtgaatcgcgacaggaactgtcactttgtattcttccataagagctttaaccatggcaaccactgttttgaagccgcccatgtagcgtcccgcgccttctgaaacaccaagaataaccggggatttttcctcttctgctgcttgtaaaatagcttgagtgaactcaaggttatttaagttaaattgtccaacagcatatcctttttctttagctgtattcaacatttccgtcattgaaactaaaggcatgtcgaaagtcctccttatgtagcctgatttgcttcttctcgaaaaaagctttccacctatagcatgaccataaaaacctgtcatatgtaaaacaacagatcgctttttctccatctctaggataccaacttttcgacaaatcggcaacacaatgacataattgtttctaattttattaattcgattttagaggtaaatattttttcaccgcgtctctgatctcatcaatgtcaaaaggtttcgcaaaatgagtcagcgctccgagctcttttgattccttaatcatatcgagttctccgtaagcggtcatgataatgacgcggatggattcgtcgatcatcttcatgcgcttgagaatttcgattccgtccatgccggggattttcatatctaaaagcacgagatcgggccgttctttcgttacgatgtccagcgcctgtatgccgttggcggcctgaaacgtctggtacccttctttatggaacacttcattgagcaatatgcgtataccgtattggtcatctacgattaaaatcttttcattcatcattttacaccccaatattatcattttcgtcaaaaggaagcagttgtttatgtattctgtttgattttcacatttcctttaattataatagtctactttccgacattttctgagcattttctcttttgttgtatactgttcttgtatgtgtaaaggaggtttcactcatgttaaagatatttacgacgcagcttgcaggcattttttcccgcattcaggataaggagtccgatgcaatagaagacggcgcgcgcctgctggcgcaggcagccgtcagcggtcataccatttatttatacggcgcaaatgagatgcagggcattttgtgcgaggcggaactcggctcagaaccgatgccttctgtcaaagcgtttccggatacagctgattcgattacagaaagcgacagggtgctgatgttttgttcaggtccgggcacggctgaagaacaggcgctggctcaaaagctttatgaaaaaggggtcggcctcgtttgcgtatctcctgtcatcaaagatcaaaccgggattgaggaattttgtgatgttcatattgacagcaaattaaaaatgccgcttctgcccgatgaagacgggacaagatacggctttccttcattaatgacaggcctgtatgtctatcacgcgctgtcctttacgttaaaggaaatgatgcaggaatatgcctgatgcagaaaaaagacttgccgcttttaaaggaggcaagtctttttttattacttctgttctgcagcttgtacggaagcgccgataaagtctttgaataaaggctgaggtcttgtcggtcttgatttgaactcagggtggaactggcaagcgacataccaaggatggtctttcagctcgatgatttccacaagacggccgtcagggcttgttcctgagaacacaaaaccgttctcttccatttgctgtctgtattcgttgttgaattcataacggtggcggtggcgttcgtataccacttcatccgaatacgcttcgaaggctttcgtgtcttcctgaagcttacaagggtacagtccgagacgaagcgttcctccaagatcctcgacatctttttgttctggcagaaggtcgatgatcggataaggagtggacggatcgatctccgcagagtgagccccttccagacctaatacgtttcgcgcatattcaatggatgcaatctgcatcccgaggcagatgccgaagaacggaattttattctcacgcgcatacttggcggcgatgattttcccttctacgccgcggtccccgaaaccgccgggcacgatgattccgtctgtgccgccagtcagctcttgaatattgctttctgtcacttcttcggcgttaatccatttgatcttcacatcagcgtcaaacgcatagcccgcgtggcgcagtgattcaacgactgaaatgtaagcgtcctgaagctcgacgtatttaccgacaaggctgattgtaatggttttagacaagtttttcactttcgtgacaaggtctttccattccgtcatatccgggtctttgcattctaatttcatatgatcgcagacaagcttatcgagtccctgctcctgaaggttaagcgggatggagtaaaggttgtccgcatcttcacactcgatgaccgctttcgtgtcaatatcgcagaagagcgcaattttatctttcatatcttgagaaatcggcatttccgtgcgcacaacgatgatattaggctgaataccgaggcttctcagctcttttacgctgtgctgcgtcggttttgttttcagctcgcccgccgctttgatgtacggaacaagcgtacagtgaatgtacatcacgttttcatggccgatgtcgcttttcatttgacggatggcttcaaggaacggaagagattcgatgtctcccactgttccgccgatctcagtaatgactacatctgcgtttgtttctttgcctgcacggtacacacggtctttcagttcatttgtgatgtgcggaatgacctgaaccgttccgccgaggtagtccccgcggcgctcttttttcaatacggcagaatagattttacctgtcgtcacgttgctgaatctgttcagattaatgtcaatgaaccgctcataatgccctaagtcaaggtcagtctcagcgccgtcatcggtaacgaatacctcaccgtgctggtacgggctcatcgttcccgggtcaacgttgatataagggtcaaatttttggatggtgacgctcatgcctctgtttttcaaaaggcggccaagtgatgctgccacaattccttttccgagtgatgatacaactcccccggttacaaaaatatatttcgtcatttcgtttgctcctctcttcggtctgcgctacattccttaaaatgtgccgttttatagaaaatcatttcactaaaaacaaatgatgtgtaaaagaatttgggagatgaaaataagaaagctccctttcaatttcttgaaagggagcgtagcactcttatgaattctcttctttttgaagagcccaaaatacatactacatagttcgacaatgaaagtcaagatcgttttgctgatataaaatcagtctttgcgatcctcttcctcatcatcataatcttcctcatcttcttcaatcatctcatcttcaatctcaagctcgtcgtcatcttcttcatcgatatcttcgtcgtcaaagctgtctgcgtcaaggtcaatatcttcttccatttcatcgagatcgatgtcatcttcatcaacttcctcgaattcatcaaggtcgagatcttcctcaacggcttttttcgcttttttctttttcgcttttacagtcggctgtgtttcttcgtccagctgatcgtacggataccagctgcggagcccccatgtctgatctgacagagcaataaagcggccgtcaatgttgaggtctgtataaaattgggcgatacggtcgcccagttcctctttcgtaacaccgagtaaggagatcatttcattcagcagctcctggaacggaaccggttttttatgttctgagaaaatttcgtgagcgatttcaactaaagccatctgcttcagctgttcctgagaatattgtttgatactcaaggtcggacactccctttctattacttatatgtatctgtttctatcctataataagaacgaatttgtattgttttgttcataaaccatacctctcattataaacaaattaaaacagaatatgctaccctaaacagcgtaatttaagaaattttagagccgccccttcataaatcggctgatgtgcgaaaacaaagccgccggcatatgcgccggcggcccgcttctttctataaagactcttgtttttcggcgccgaatacagacatggcgagcaattcactgacatcataagtgccgatcgcgtcttcggcttctttcgctttcgtcccgtcaccgagcatggtcagacagtaaggacatccggagctgatgaccgtcggactgacagaaagcgcctgctcagtccgggccgtgttgatcctcgctcccgtttcttcttccatccacatgagccctcccccggcgccgcagcacatcccgttttcgcggctgcgctccatttccttcaattgaacgcccggaatggcttttaagatcgctctcggcggctcatacacttcgttgtatcttcctaaatagcacgagtcatggaaggtaatcgtttcattgaccgggtgaagcggttttagtttcccctgtgacacaagctcggctaataattcagtatgatgatagacttcggcccggaatccgaaatcagggtattcatttttgaacatattataggcgtgcggatcaattgtgacgatttttttgattccgtgtttttcaaattcgccgatgttgtgttccgccagctcttggaacagaaactcgttgcccaaacggcgcggcgtatcgcctgagtttttttccttattgccgagaatcgcaaaggatacgcccgcttcattgagcagctttgcaaatgaaacggcaatcttttggctcctgttgtcgtaggaacccattgagccgacccaaaacaaatagtcgaactctttgtcttgttttttcatttctttcactgtcggaatctctgtatcagcctgctcccgccagttctcccgctctttccggtttaagccccacgggtttccctgtctttcaatgcttgtcatggcccgctgcgcgtcgctgtccatcttcccttccgtaagcacaagatagcggcgcagatcgataattttatcaacgtgttcattcatgaccggacattgatcttcacagttgcggcaagtggtgcacgcccaaatctcctcttccgtgatgacctcgccgattaagctcgggttgtaatcaatggctgccgccgcttcacgcgatcctccccctgaggaagccgcggcgagctgattcgccttcgtgtgctgaaaaacgggcgcgggcacccacggagattttgatgtcacggcagcgcctttttccgtcaaatggtctctgagctttaaaatgaggtccatcggcgagagcatcttgcccgtaccggaggccggacacatatttgtacagcggccgcattcgacgcaggcgtaaaggtcgacaagctgagagcggcggaagtcttcaatctttccgacgccgtagctttctttcgtctcatcggtaaaatcgattttttccagctttccttttgaatccagcctgctgaggaacacattcgccggacccgcaattaagtgcgcatgctttgattgcggcacgtacactaaaaagctgagcaaaaacaacagatgaagccaccatgaaacataaaacacggcggcggccgccggcgctgaaagaccgccgagcacaaacgcaatggaggaagcgatcggttccgtccaagacagagaatgatcgtgccataaaaggttcatggcgttcccgagcagcaccgtcaccatcagtccgccgataaacagcaggacaagccccgctttaaacccgcgtttcaatctgacgagcttttcaatgtagcgccggtaaaacgcccagactacggcgattaaaatcagaaacgtgacgatttcctgaaaaaaggtaaatgccggataaagcgggccgaacggcagatgccggtcaggaagcagccctttcagaataaaatcaattgcgccgaactgaacgagtataaaaccgtaaaaaaacagaacgtggatgattccgctctttttatctttcagcaattttttctgtccgaacacattcacccatatcttctgaagacgttctttcaggcgtttatcaaattcttccctttggccgagcttaatataagcgatcctcgttctgatcaggtaaacgaataaataaacggcgtaagcggttacagctgaaaacagcagcgcgtttaccatgagaaatgcgttcatcttgtctccccctttgttctgattcccctcttcattgtcatatctttactttatcataaataatgaatgagtgttcagtcaataattaaattcacattctcagggcacactacggatacttcggaaaggagcgtcggtatgaaggtcatttttgtgttgcttgtcatttttatcatattgatcgcacttatgctgcttgatatgctgcttggccgggcggcgtacaaaaaacaggcgtatgagcccgtttttgaccccaaaaaaagtgatatcacactcattcactgcggcagcgagcttgtgcagcagatgacggctgatatccgccaagccgtctcttctattcatatgatgttttttattatgaagaacgaccaagtcagccatgagatgtttgatttattgaaagaaaaggcccgggccggcgtctccgtatatctgctgctcgattgggcgggcagccgccaagtgaaaaagccttccattcaaacgatgaaaaaagccggcgttcacgttcattttctaaataaaccggcatttccctttctttttttcaggctgcaaaaacggaatcaccggaaagtgaccgtcattgacggcaaaatcggctatgtgggcggctttaatatcgctgaagagtacctcggaaaaaaagcgaagttcggaaactgggaggattatcacctgcggatgaccggcgaaggcacggcagatcttcagactctttttgtaagcgacctgaaacgaaacaccggaaaaacacccgaatcacccggggtttatccggcattatccgaagggaatatctctcataggacatatgcatctgacggtttttcgcttgaatcgcattatgaaaactgcatccgtaaggcggagaaaaaaatcatcatcggcacgccttattatgtaccgagcaaaaagcttcaggaagcgcttatttcagcctgccgaaaaggcgtcaaagtcatcttgatcgttccgatgaaatcagatcacccgctcgttcgggaaacagcttttacctattatcccgagctcctgaaggccggctgcctcatctatcggtattatcaaggcttttatcatgttaaagccttcattatagatgaccgcatcagcattatcggcacgccgaattttgataaacggagcctgttctggaatgaagaggtaaatgtcatcattcatgatgaggcctttacaaaggaagtgctttcaaccataaagcaggacatcgaaaaatccgagcttctcacattagaaaaagtgaaacagcgctccgtcagacagcttcctgcagaatggctgggaaaggccatatcttactttttataaaggagaaaccatatgctgttcagattcggattcgtcgcaaacgccatgtgcctttgggacgcgtcccccgccaaaaccttaacatatgcgcgctataccaagctttcccgcagtgagcggaaagacgctctgctttctgtgacgaaagcaaatcttaccaatacgctgcgcaccctccactatgtggtcggccacggcatccctttgtacaggttctcaagctcaattgtgccgctcgccacgcacccggatgtactgtgggattttgtcacgccgtttcgccaggagtttcgtgagatcggcgggctggtcagaaaatatgacctcagaacgagctttcatccgaaccaattcacgctttttacaagcccgaaacgggagattaccgcaaatgcggtcaaggatatggcctatcattatgacatgctggacgcaatgggcatcgcggaccgttccgtcatcaacatccatgtcggaggcgcttacggtgacaaacaaagcgcgcttggccgtttccgcgtgaatctgaaagaacttcccgaagtcatcaaacagcggatgactttagaaaacgatgataaaacatatacgtccgaggaaacactcagtgtatgtgagcaagaaggcattccgtttgtgtttgattatcaccatttttacgccaatccggccgatgacgctgatttagatgacattcttccgcggatgatcaaaacatggcagcggatcggcttaaagccgaaggtccatctctcctcgccaaaatcagaatcagccgtacgcagtcatgcggactatgtggacgcgaattttattctgccggtgctggagcggttcagacaatgggatgcgggcatcgattttatgattgaggcgaaagagaaagaccgggcgctgctccggctcgtcgaagaattaagcgccatccgcggagttaaacgcctggcgggcggagtgctgaggtggaaggcataaccaggtttatcacccgttcatatggggaatttccgaaataacagaccatcagacggaggagaaaacacatgaaaaacattacatctttgaaaatagccgctaagaagttcactttaagaaacatgcttcagctttatcagctttgccacacgggaggccacgagctgtatatctactctaaaaaaacaatgtgcaaaatcaaagatatcattgagctggaaacgttcagaatggctcataaagaacaagaatatttaattgtagtggaaggaaagaaagcggtgcagcttgttgaccgtttcaaacatatcatcgaacctgcgcaaaaagaagcccattaaatacggactacataaaaaaaaggatagacaggaggctgcccggcccccgctcgtctatcctttttccattattcatgtatcagctcgccgaattgggcctgatggagtctctggtatatgccgccggatgccagcagttccttatgatgaccttgttcagcgatgccttctttcgtgacgacgacgatcctgtccgcatccttaatcgtagccagccgatgggcgatcacaagcgtcgtgcgtccttcagacagctcttgcagcgatttttgaatggcggcttccgtttctgtatcgagggctgatgtagcctcgtctaaaattaagatcgacgggtttttcaaaaacattctggcgatggaaagccgctgcttctgcccgcctgacagcttcacgccgcgctcgccgatcaccgtgtttaaaccgtcgggatacccgtttaccagctcctctaaatgcgcctggcggacggcctgccggatttcttcctcagacgcatcgagccgcccgtacgcaatgttttcccgcaatgtgccggaaaacagaaagacatcctgctggacgacgccgatttgtccgcgcaatgatgacagcgtcatgtccttaatatcaattccatcgatggaaatcacgccttcagacggatcataaaaacgcggcagcagacttgtcagcgttgattttccggctcccgaaggcccaacgaatgcgactgtctcccctgcatgaatggacaaattgattcccgacagaaccgggctgttttcttcgtaaccgaatgacacaccatcataacggatattcccttttaaaccggacacatgtctcgcgttcggggcgtccttgatatcaggctccgtttccattatttctataaagcttttaaaaccggctatgcctctcggatacagctcaataattgcgttgattttatcaatcggacggaacagaacgttcgtcagcagcacaaaagcgacgaattccccgtaagataacgatccgcggatcacgaaccatgtcccgcacaacaggacgaacagcgtgacgaatcttgtcagcatgtaactgatcgagccgtttttcgccatgattttatatgacgtcagctttgttttgcggaaacgctgattgttcacgtcaaaccgctgcgtttcaaacgcttcattgctgaaagcctgaacaagacggatgccgccgatattgttttcgaccctcgcgctgaagtctccgacgtctttgttcagttttgtaaacgcagaggtcatttttttattgaaatacaaagcaagccaaatgacgaccggcataatgataaaggtcaacagcgcgagctgccagttaatgaacagcatcacaccgaacgcgcccaaaatcgtcatgaccgcgataaacaggtcttcaggcccgtggtgggcggtttctccgatatacatcaaatcattggtgagcttggacattaaactgcccgttttgttgttatcgtaaaatttgaacgaaagcttttgcagatggtcaaaaagctttttacgcatatcggtttcaatgttaatgccgagcatatggccccaatacgtcacaacatactgaagcgccgagctgagggcgtagactccgaataaagcagcggaagtcaaaataatcagacgccaatcccgcccgggagcaatgtatcgataaagtaattaacaatcagaggaaaactcagctccatcaatccgccggcgatggcagaaaagaagtcgagaaaaaacagcttcttgtacggtttataataagaaaaaaattgtcgcagcacgtttccgtcctccttgtgcctcgttcctaatgataatatttctcaattatactatacacaaggagttttaaaagcgttttttataaaacgccggaaaataaccgcgcgaaggattccttcgttctttcccataatgtgcgcttatagaaacggacggggctgattttctcagactctctcatatcctccagataatgcgcttcaagatctttgatcgccttttgatctgtaaaaaagacattgacctcaaagttcagctgaaagcttctcatgtccatgttcgccgtcccgacagaggcgaggtttccgtcagtgatgagcaccttttgatgcataaagcctttttgataggaatagacttcgattccttcgcgaagaagctcggggaaatacgatctcgtcgcgtactgggttaaaaatccgtcattggtttccggcaccatgactcgcacccggacgcctctggcagcagcctcctttagcgctgtgcggatcggctcattcggcacgaaataaggcgtcgcgatccatacagatgattcggccgccgctatcatggcataatacagatcgctcatccgctccttcatatcggggcccgtcggaacgacttgatagacgccgccgctttctgcagggaccgggcggctgtatgctttctgatcaatcagcacctcatccgaaacgtattcccaatcaagcataaaaatgctgtggagcgtctgaacgatttctccttcgactttcatatgggtgtcccgccaaaaaccgacactttggtctttgccgatatactccttgccgacattcagcccgccgacaaaaccggttttcccgtcaacgatgacgatcttgcggtgatttctgaaattgaacttttggttgaaaaaaccgtatttcagcggcagaaacgggacgatgttcacgcccgcgcgtttcagttttttaatgtcttttccggccagcttcaggctgccggccgcgtcgaacaaaaaccgcacttccacgccttgacgcgctttttccatcataatgtccatcatcttgtgcccaagcatgtctgatttgaacatgtaatactcaatatgtataaatgatgctgccgaccggagcgcttcaaacagctccggaaatgtttcatccccgtttttgagcaccttcagcctgctttttgtattgatattcatatgagacgccttgattgaatattgaaagaaacgcttctgatttcctttcagcccggacagatcgggcgtctgttccatatcaaatatcgttctcagcttttcccggttgtatgtccgtttcgacctgaacagcttgcctttttcataaagctggccggaaaaaaggtaaaataagtacccggcgatcggaaaaaacacaagaatatgaatccataacagcgtgtgctgagaggtgcggttttcaagaattaacgaatagatgctgaacaaaataatgcttgcatagcaaagcaaccctccgtaaaactcaagcctggaaaccggaaaaaaccatatgacatatgctccgataagcatcatatataaaaagcaaaattccagtctccttttcagcatcccgactctctcccatctgatccgatatctctgtataccctctgttttccggcctgtaaacatatgaaaaatcctctccgcacgagcggaaaggattatgatgacacttcctgtgactggccggttgtgatgttctgaagcaatgccggattgagcgagcagctgcctttgattttatttttgaagatgccgatgatcagaccggtgaccgctatcgacactaaggagaagagccctttcagcaatccgacggaaaaaatgccggccagcacgacgccaaaatcgaagaggaaattaacggcacccggattccatccgcagcgcttttgcagaaataaagcgaggatattggcgccgccgagcgatgcctgatgataaaacatgagcgacaggccgaacccgatcagcgccccgccgcaaatcgccccggcaagcggtgaaacagagaccggcggcagccagtgatccgcgccggtaaacagagtcagcacagtgactgcaaaaacggtggatagagtgaatttgattcccattctgatgagagaaaatatataaaacgggatattgatcagaaagaagataatcgcaaatgaggaatgaaacaagtacgacaggcttagtgacagtcccgctgtgccgccggttaatacatgagaatgtctgagtgtcaggacgccggcgcttgtcatcagacaggcggctaaaatgaggaaaatccgcttcattcttcactctccttttgttgatattatttccacataaaacataacaggaatccccgccgcccagccattaccttggcagaaaatatcttatgtttttattttttcaccataaaaaaatccccctcttgcagggggatttttacgtgcgtttccgatagacaacatagctgcgggtcaaatacttgaggggcaggctgaacacgtgaaccaatcttgtaaacggccaaaggataaaaacgacgtaccctatgatgatatgaaacttaaaccatagcgggacactctccatcaaagaagcgtcaggccggaacaaaacaatttccctgaaccacggcccgactgttgccctgtaatcaaatcctttcgagtcaatgttgagaaacgtggccgcaacgcccgacagcatcatgaacagcagcagaataagcgtcaggatatccgatggcgagctggttttgcggattcttttgtcaaacagccttctgtatgtcaggatcactagtccggcacaagccgcgatcccagccggcaggcctgcgccgatcgccattttgtgatacgtatgctctgaaatgcccagtacagtatacacgccttccgggatcagaattcccatgacatgtccgccgacaacgaacagcagtccccagtgaaaaagtgtgctgcccgccgcaagttttttcttttctaacagctcgcttgatttcgccgtccagccaaactggtcatgctgatagcggtaaatatgcccgccgataaagatcgtcaataccatgtacggcataatcccccacaggatctgcccgctcatgcctgagcagccccttcttcagtgctttcacgtacaccgatgctttccagcgcggcctgcagcacgtgcagcagctcagcatagaggctgtcatttttttcgaggcgggaagccagctccctcacattggacaggtatttctcaaacacgcttctcgccgcttcaatctccgcaaccgcggcgaattccagcatcagcggcagataatcaggcaattctttctctgtcggcaggaaaccggattgctggtaggtgttttttaaatgcagcagttcaattccgcgctccctttgctcgcctgagttaaagtaggtgacgtacatattcgtttttttcccgaagtcgaacgtatacacatagtgttcaatcagcgcttgcggagaaaagccggctgccgcctctaaaaagtgcagcagtttctcacggatttgctgaatgccgatttcatggataagagccttccaatcgggaagcccggctctccactcttcatccggataagagagaagaatggaaagagcggagaatgtcatttgccggtctgtggtgttcatcttgttccacctcatttatcaaaagttagaaacaagagccggggccgcctgaaaatgacaagccgcagcttccttgttcagcgtataaatcagacacttcttctcgatggctgctcgggatcacaaagcggtcatcatatttggcgatcgccagcagccgatacatgtcttcaatttgcttttctgttaagccgacactggagatcagtgccgggtcgatggatttattcgtctggactgctctcatatactggcgcatgacagacattttctttaacgttgaccgaatatgatccgtatcaccggctgttaataactgggccaaatagtcaatcggaattctcatttggtcgatagccggaaaaatatcttccgccgtttgccggctgccttttccttcaaagagattcataatcgggctcagcggcggaatgtaccaaaccatcggcagtgtgcggtactcaggatgaagcggcagcgcaatcttccaatcgatgatcattttgtagatcggcgattgctgcgcggcctctatccattcagccgggatgccttgttcttttgccagtttggcaacttcaggatcattcggatcaagaaaaacgtctaattgggaatggtagagatccttttcattttcaatggaggccgcttcctccactttgtccgcgtcgtacagcatgacgccgagatagcggattctgcctacacacgtttcggagcagatggtcggcagccccgcctccaagcgcggaaagcagagtgtgcatttttccgctttgttcgtttgccagttaaaatagacttttttataaggacaggatgagacgcaatatctccatgaacggcatgcgttttgatcaacgagaacgatgccgtcttcctcgcgtttgtacatggcgccggacgggcaggaggacacgcacgccggattgatgcagtgctcacaaatacgcggcagatacatcataaagacttcatcgaattctgttttgatcgattcctccatcttttgcacgtttggatcttcaagacccgtaatgtggccgccagcgagatcatcctcccagttcgggccccattcgatattcataaaatcgcccgtcaaggacgatttcggccgcgccaccggctggtgctttttctgcgggctgtttgttaatgtttcataatcatagttccaaggttcatagtaatcatcaatcgtcggctggttcgggttatagaaaaggcctgcaagccggtttgttttcgggcctgatttcagttcaagctttccttttttcaacgtccagccgcctttatatttgtcctggtcctcccattgcttcgggtagccgataccgggctttgtttcaacattattgaagtacatatattccgcaccggaacggtttgtccacgtgtttttacaggtgacgctgcacgtgtggcagccgatgcatttatccaagttcatgaccattccgatctgcgctttaatcttcaagccaatcgacctccttcagcttgcggatgacgacattcagatcgcgctgattccccgtcggaccgtaatagttaaagccgtagctgagctgtgcgtagcccccgatcatctgggtcggcttgacgtgaatccttgtcgggctgttatgggtgcctccgcggttattcgtcagttttgtgccgggcacgttgatgtggcggtcctgggcatggtgcataaacgccattcctttaggaatccggtgagacaaaaccgctctcgccacgacaacgccgtttcggttgaagcattcaatccaatcgttgtctttgatatccgtgtcctttgcgtcatctttattcatccacacggtcggcccgccccggaacagcgtcagcatcggcagggaatcaaaatacatgctgtggacggaccatttattatgcggcgtcaaataattaagaacgatctctttgccctcttgatcaggccgcttgctcaggaacggacggtgctggaggatcggtttaaatgtcgccatcgtttcaccgaattccatcatcagttcatgatcgacataataggattgtctgccggtcagtgtcctccacgggattaatttttccacattcgtcgtaaacggcgagtacctgcgccctcctttttctgagccggtaaaggccggagacgtgatgaccgttttcggctgggctgtaatttgctcgaacgtaaagcattcttcctcgcgttcttccgccaggtctttcagcttcaggtttgtgatgttttcaagcgattcccatgcttttacggcgacctttccatttgaggtggacgacagggttaaaatcgcttctgccgcctgctttgcttcacttatattcgggcatcctttggcaacgccgtctgaatcggtttctcccagtctctttttgagtgattcatattcatccgcaatcgaccagctcatcccttttgttccgctcggttttaaagccgtatgagggccgagcgcggtcattttatgaaaaatgtgtttgtaatcccgttcagcgacttggatattcggcatcgtttttcccggaatggcttcacattcgcccttgctccagtcattgatttttccgaacggctgggccaattcctgcatcgtgtcgtggaggagcggcgtcgcgactacctctttcaccagctccatatcgacttcttccgccaggtcggaaacggcttttgacagtgctttgaaaatatcccagtctgacctcgattcccacggcgccgagatcgccggagcgaatggatgaatgaacgggtgcatatccgtgctgctgagatcgtgtttttcataccatgtcgctgccggcagcacgatatcggaatacagcgccgtaccggccattcgaaagtcgagattgattaacaagtcgagcttgccttccggcgcctgctcccgccatttgatttcttcagggcggatgctgtcgctgtcgtcattcatcaaaccgttcgtcgtccccagcagatgcttaagaaaatattcatgcccttttcctgagcttgagatcagatttgcccgccatacaaagagattccttgggaaattcacttcattgtccgggtcttcaatcgcgaatttcagttttttctcctgaagctgtgaggccacgtacgcacctacgtcttcaggtgtcgccgcccccgccttctcagcttctttgtacagatcaatgccgttttgattgaatgtcgggtaggacggcagccaccctaatcgcgccgccagcacattgtaatcggcgtgatgcttgtagcgggatgaagaagcgatcggtgaagccaagtcactgatcggctggtcttcgtaacgccactggtctgtcgcaaagtagaaaaatgaggtgccgttttgcagtttaggcacgccttcccagtcctttgcggttgcgatcgtctgccacccttcagcaggacggagcttttcctgaccgacataatgagcccagcctccgccgtttacgccttgggcgcctaccaataaaacaagatttaacaccgcgcggtaaatcgtgtcggagttgaaccagtggttgattcccgcccctacgataatcatcgatctgccgtctgtatcaatcgcattttgggcaaactccctggcaatctgtataacggcttctcttttaattcccgtgatctgttcctgccaggcaggtgtgaacggacggggatcatcataagatgcggctgattgtccgccgatgccccggttcacgccgtagttggccaatatcaagtcaaatacagtcgtgacacacacctcttcaccgttcagttccagttttttaataggaagattccgctcaagcactttgtttccgtcatttgaaaaatacggaatgcgcaccgtactgatttcgtcctctattccgagcacggagagacggggctcgatctgttccccggtgtcttcatcgatcatgtgcagattccatttctgctgcccgtcccagcgggagcccattgttccttgcggtatggcaaacgcacctgtctgttcattccagaccgccggcttccattgatcatgctttgtctgccgtccgatatccttcgcatgcagaaaccgtcccgctgtgtatacgccattttcttttgataaggtgacgaggaatggaaaatccgtgtattgcttcgcgtattccatgaaacgttccgtctcttgattcacgtaaaattcctgcagaatgacgtgacccatcgccatcgccagggctccgtcagtcccttggcggatactgagccagtcatccgcaaactttgaggattccgcaaaatcgggactgattgaaatcaccttggcccctttatagcgggcctccgccaaaaagtgcgcgtcaggcgttctcgttaacggaacgttggaaccccatgtgatgatgtagcctgaattgtaccaatcactgctttccggaacgtccgtctggtcaccccaaatttgcggggacgccggcgggagatccgcataccagtcataaaaactgagcattgggccgccgattaaagacatgaatcgcgaacctgacgcgtggctgatcatggacatcgccgggatcggagaaaaaccgacattccggtcaggcccgtatttcatcactgtatacagcagagaggctgaaatcagcttcagcacttccggccattccgcgcggacaaagccgcctttccctcttgcctgtttataggacttcgctttttcagggttttcaacgatcgatttccaggcatccagcggattttgatgcgtctgcaatgcttcccgccacaaattgatcagcacacctcgcacatatggatatttcacacggagcgggctgtagatgtaccatgaaaaactggccccccgcggacagcctctcggttcgaaatcaggcatatccggtcctgttgatggataattcaagttttgtccttcccacgtgacaattccgtttttcacataaatattccagctgcaagaacccgtgcagttgacgccgtgggtggagcgaacgactttgtcgtactgccatctgtttctgtatacattctcccaatcacgatcttcgcttgtcgtttggctatgtttatttgaatgatgttcgataggagaaaaatagtttaatctcctgagcaacggactcattttctttttcttcatgatcgttcactccttccgagtcaggtgatgctatgtacactataaacagagacggcgcatcaccttgtgaactaagtcacacactctgcttttttcacaaaacgttcacacagagcagcaggaaggatttttaaacgatatgaggacgcccgcgtcatcaaaaaaaccggttctgtttaagaaccgggttcggcgttttcatccagtgatgtatgcagataccgcaaaaacaactgataggaacagaagacattttgctgaagcatcgccaaaaagttcatttgcagccgcggatggtaagacatcatttgcttaaatatagaatatggaatatggagtaccagaatatccggtgaggcattgactgagataaaaggcgataaagagagcccgcctttttcatcaatcggaaacacatcgcctttttcccacagcgcaacggtttgcgacccttcagggagcctgctgtccgtaaaacggatattgccttttaatacaatataaacggattgtgaatgaagaaaggatggagattggtcagatgagccgcggataaacgtcccgtttttcagcaaggtttcgacaatggacagaggcacttcattaaacataggaagttgtttcagaaataataaatagtcacactgattcataggaaagcctcctgtgctattgatagctttagtgtagcccgattgagcccgcgcggcagtgatgtatttcacagcttgtatgatgaaagtcacttatcaggagagtgtttgcacttataatgaaataaaaaggagggtttcgatgaaagcgatgattccgaagcagcacggcgcatgggcgatgctgctgattccatttttactcggcatggtcaagggaggcccggttttctggcatattccgctctttctgggctggctgttcctttacttgacggtttatcccgtttcgctcgctttgaaaaagaaacagcttcagccttatcaaaagtggatatggtattacggttttccggcctgctgctttttgatcatttctgtctttcataagccgcagctcgtctggatcggcgtttttttattgccgctgtttctcatacatacgcattatgcccgccgaaaaaacgaacgggcgctcacgaatgatattgcgggagtcttgttcttttgttcaggcgggcttgcgagctgctggctgggaacgggaatccttgacggctgggcttggtttctattcttgcaatccgctttattttttgtcgggagttctttttatgtgaaatcggtcatacgggagagaaaaaacagaaggtttgcttactggtcgtggggatatcacctcttgctcccctttttatcggctcttctcggggcaggctgggcgtttctcgcttttatcccaagcagtctgcgggcctggttttttcacggaagagactggccggtgaaaacgatcggcattctggaaatcgtaaatgccggcttctttttcgccgtcatgtgtatatgtatcacaagctgaaaaacaaggacaccggctgcccttgttttttcagtcaatattgcagatctcaagcggacaattttcacactcgatctcgcatcgtaaatagtcccgcttgtgcaaaataatttttccggtttcgtctatcgaaataaccccttgtttgcggaggtctcccagcatgcggttgacgctctcccttgccgccgcgcaaaacttagccaaatcctgatttgtcagcacaatgttaatcagaatcccgtcgcttcgttccaccccgtagctgtttgataagcggataagggtggaatagagcgccccttttttgccgtgaagaagcagatccctgatcttagactggatttttcgcagatgggtgctcatccatttcataaattcaaacgtcaaaacaccgttttggaccaattccttttccagcctgtttttattaatgacgagcacctccccgtcctctaacactttcgcactgagcatatatctcggctcatctgtgaatagcgtcaattctccgacaatatcgtgtttttggcagattctaagtgtcaggtcttttccgtcagatgtcagcttgccgatttcaatgagtcctgattgaatcagataaagctcttctgcatccattccttcttgaaacaaatacgtgtgttttttcattttccttttcgtactgatcgattccagcaattcatgcagttcgcgggaaagaagttctttatcagattttcggacagagagaatattcatgagctcacctcgaagaaagtcacgttgcgtatgtatattgtaacgtgacttgatttgcactcacccagaaaaaactaacaatcttgtgaatggatcattatgaatcaaggctatgactgtttctctccgtatgtgttttcattctttcctgccaatacatccagatcacaaggacaaagctggctaacgcaacctctgaaagcgccataaacccgatcgcgtattgacccgttgcctgaaatacacttgccagaatcagcggagggaaaaaaccgcccagtccgcccatggcagacacaataccgttggcaatcccagcttgcttcgaaaaatagaaaggcaccagtttaaataccgtcccgtttccaatccctgagcagactgccaccgtcagcgatccgaacgcataaaggccgatcgccggggagaatgacagcatgacgcctgacagcgtaagccctgcgaaaacgaacatcagaatgcggagcgggctcagtttatctgcaagaaaccctcccacaggcctgagcagcgtagagaccgcaataaagccggccgtccgcagaccggcgtccgcagggctcagcccaaaatgctcaaccaaaaaattcggaagatagatggtaaaggcgacaaaggcgccgaacgtaataaaataaaacaggctcaacatccacagcacatgatttcggtaaacggctttcatttgtgtctttatggaaactttgactttcttctcatgccggtcgccgaacaaaacgtgcagtaatgcgaaaacagccagcaaaacaagatacatctgcacggttgctttccatcccgcggcttgagcgataaccggcgccgcaaaggtagtaacggcggtcccgatgtttccggcaccgtaaatcccattgacgacaccgtgcttttctttcggataatatttcgggagggacgtcactccgatggagaataccgctccgccgatccctaagaaaaagccgcccgtgattaaatcaaataaagaatccgcgatactgatccaaaatacgggaaacaaaagcaggatgaagctgatcataaacatcagccgcgcgccatacctgttcgttaaatatcctaaaggaatacggagaagcgatccgagaataacgggaatcgccgtcaccaatgaaatctcgcctttgcttaaatgaatatctgatgtcatttgagaaatgagcgatgaaatcagcacccacaccataaaccctgccactaagcttaaagactgcagcgataattgaatatgttgacgattgatcattcggcttgcccctttcactgattcaatatcagtcttatcatacaaaaactcagtgtgctggattgtgaattacatcacacgctttatatgcaaaaaaaagaacaaagcccgaagactttgtcctttgatcatcattacattttttccggagcggatacgccgatcagctgaagcgcattgttcagcgtaatttgcgtcgccttcattaaagcgagacgcgcgcggctcttctctttattttccggatcgatgactttctccgcattgtagaagctgtgcagagcggaagccagatcataaatatagtttgtgacacggtgaggaatgcgtttttctgccgcttctgccactgcttcagggaagccgccgattgttttcagcaggtcatattctttttctgattgaatatggctgaaatcaagatctgccgccggtttaagtccctgctcctccccttggcgaagcatgctgcaaatacgtgcatgtgcgtattgcgcataatacacagggttttcattagatgtggatacggcaagatccaagtcaaaatccatatgcgtatcagcgctgcgcatcgcgaagaaataacgcacggcatccaagccgacttcttcaatcaggtcgcgcatcgttacggctttccccgtacgtttgctcatcttcattttttcgccgtttttgtataaatgaacgagctgaatgatctcaacttccaatgtgcctttcttgtaaccgagcgcttcaatcgccgctttcatacgcggaatatacccgtggtgatccgcgccccatacattgatgagcttgtcgaatccgcggtcaagtttgtctttatggtatgcgatatccggcagcagataagtgtatgagccgtcttttttgatcagcacacggtctttatcgtcgccgaacgttgtggagcggaaccatgtcgcgccgtcctcttcgtatacatggcccttttcgcgaagcgcctcgagcgcctgatcaatttttccgttttcgtacagtgacgtttcagaataccatacgtcaaacggcacgcggaagttttccaggtcggagcgaagtttatcaagctcgtactttaagccgtattcacggaaaaacgcctgacgttcgctctcctcttcatgtacgaaacggtcgccgaaatcttcggcaagctttttcccgattgctataatatcctcgccgcggtaaccgtcttccggcatcggtttctcgaggccgagcgcttcaaaataacggacttcaacggaaagcgccaggttgttaatctggttgcccgcatcattaatatagtattcacggctcacatcatagcccgctttagaaagcacgctgcacagcgcgtcacctaccgccgcgccgcgcgcatggcctaagtgaagatctcccgtcgggttggccgatacgaattcgacctgaatcttttcgccttgtccgatgtttgtctctccgtaatgttcacccgcttcaagcacggacggaatcagttttgttaagtagctgttgttcatgtaaaagttgataaagccgggccccgcaatatccatcttttcaatggaagctttgcctttatcaaatgacgccacgatctcctcagcgatttggcgcggcgctttttttgcgattctcgccagctgcatcgccatgtttgtggaataatcaccgtgtgttttgtctttcggcgtttctaacagtacgcttggaatctggctttcttccgccaggcccgctttcagaacggccgctttgatctcttccttcagcacgtccttcatttgttccgcaatattcatgcctttgtttcctccttatattggatcgtcatgttatgtacatgttcttggttttcgcctacagtcatgttatatgtcagtttgacggagccttccgaaccgccgacatcagattgaatgtttttcgtttccgtacggagctccatttgtccgaacggcagtttatattgagtgagtgtcgatgcccccggaatgaaccgctgtttcatttggatggcgcccgatctcattacgagaatctctttttctgtaatcttgacgaccgttttaatcttgcccaaatcatgctcttcgtgataggaaagatacgttttgccgtttctcacgtaatagaatccactcgatgtaaattcaaccgactcttcttcggagccgttatgaatgaatgattgcacatgaatggctactggtgtctcctgtctcatgctgacacttccttttcatcatcccgcttaacctgaatagtataagttttcaagggaaaaagttcaaccgcttcctcctatcttaccatctttgctgattggttttgaagataaacatgatttttaaggaaaatgaaaaaaccggaaatcctaggctgcgggataaatgcggttccttcggcggacggctttgtcaaaggggaaaagtttgcggtatttttgcgctatccttccgaatgaaaatgataaaatatgtcatatacataacgtggaagggagggattcggaatagtggcgagtgttttatcgtcttcagcggttggagaaaaaatcaacgaatggtatatgtacattcgaaggttcagcatcccggacgccgagtacttgcggagagaaatcaaagaagagcttgcaggcctggaagaagatcaggatcttcatctgtactattctctcatggaattccgccacaatctgatgctcgaatacctcgaaccgctggaatcgcagcggatagaagaacagccgagactatcggatctgctcgcggatattgataaaaagcaggcccggctgaccggacggcttgattattattttaattttttccgggggatgtatgagctggatcagcgggaatatttgtcggctataaaattttttaaaaaggctgagacgaaactctcatttattaaggatactattgataaagccgagtactttttcaagatgtctgaagtctactactatttgaaacaaacgtatgtatctaccgattacgcaaggcaggcatatgaaatatataaagctcagtcgtcatacgatatcaggctcatacaatgccaatccttattcggagcaaatttcctggatttaaaactatatgatcgggcaattactcactttcaaaaggctttttctttggcagaaacagaaaaacagcctcaattaatgggcaggacgctgtataacatcgcactttgcaaacaaagcctgaacgactatgaagcagctataacttatgttgaaaaagccattgatgtttttgaaagtgctaaaatgaccccttctttgccccaagcatattttttaatgacacagattcattataaattagaaagatacgacaaagcgctcgagtatcataaaaaaggagttatctattccgaagagtcagcagattcagtttatttacatgaattcgaatttttaaaatctttgtatgtgaacggacctgatgaggatgcaatgaaaaggagttttgactttttggaaagtaagatgatgtatgcagatatagaagattttgctcttgatgcagctaaatattatcacaaacttgaagattataaaaaagcttcaacatactttttaaaagttgaagaagcaagacagcatattcaagggggggtaactttttatgaagctgaagtataaggtcttactcacttgcttagctgtaacctcagtttttataacagcagatatgacgaatacaccttcacaccaattcgaagtagcacaaagagctatgatttaaatgataattacttttaggcttgcaggttaaactgcaagccgttttttatataaacaactaatttacaaaaacaaaaaacataccttagaactcaaatgtgtaaaaagtatttgacacttatacatatattatttaaaataaatatatataaatttgaaaatttaaaataaaaaacaaaataagttaaggagggttttagtggataacaatataaaaaaacttagaacagcagctgatatttcacaaaatgatctggctaagctctgcaatgtgaccaggcaaaccatcaatgcaattgaaaataataaatatgacccgactttaagtctggctttttcgatagctcacgctttaaatacgggaatagataaagtattcaactataacgccaaaaaaaattaagggagcggttcttatgaagaaaatggatgagatgcaaaaacaccaatcgggtacagccgccagaatagcatttagtttttatactgtcgctttactgatatggtcattaatagattattttaaaaacggaaatacaggatggcaatttccgattcttttaataggctgcgcgctctatttatggattcaagtttatcaaaatcgaaaaacaaggtaacgattccaatacacttccggaggattatacagcaatgtacgaatacaagttcataaaagcagaagtaaaccgatggaaaggaaagcctaaagaagactataaataaattattgaaaagtattcgcagcaagggtgaaagctggttcaaatatttgctcctgctatttcaggctatggggcagctgattattttgatattatttttgaaaaaaaagtataatgtttcagtaccaaagaaagccggatcatacatatggtccggctttctttgtacgaaataagccagcagatacttttacggatttcacctcttaactattattttttcggaaatccgcaattcaaatagattccaatatattttattatttaacttgctggggatattgaaaaaattggaggaaaaaatgaatctacttttaaaaacacaaaatagtaaagcgatttttacattagtagcatcaggaatcattgttctcgctcttttcagtatgaaacataatcatttaagcatggatgttatcgatattttaaacagagctggaattatcgctcctagttggattgtcagtgctatcaccgcaacgggatcagttctggctatcattactgttttaggatctcttggtgcaggcttgccattggccgttttagaacaattggctgcagcaagtacagcagcagcataatataaaacattaaattcaatatccctggcagtccctttaacgaatggatgaaaatacattgtttaaaaagaatgttttagtcaaattgtacatactctgtctgatcttatttttaattgctttatttacagcatatatttatacagattccgcttcaaatgtaaataatctaaatcgaaatatccgtccggatttttttcagattttctttaataatattaaagtagcgagtctgcttgtttttttaggcccgttaacgctgtcgcttggcacggttgctgttttaattattaatggattaattttaggaaatgcgataggaaacattaaagacaatttaaaccttttactgcttgttataccccatggaataattgaagtgccggtattgcttcttgcagcctctgtaggaatgaaattaactttagatttattactcctcaaaataaatttgaaattcacttttaaatatattggtattatatttctcggtttaatgatagcagctatgttagaaacatttattacacctatctttataaaaggagcctcttaggattatgcaaattgaattatcttcatttaaggaacgaaacattaattttttgtcctcgtttttgttttatattatcgggttagctttttatttaagttcccttttaccttttatgaaaagtttaattcccaaaaacatccctatacaagttgttgagcaagtaaaacatttagattacatcattgcaatagccgcactgtttcttttaatgttcggggtcatttttgaaggattcgtattatttctcattataaattttcttggcgctcagattaagatcaaaactttttattccctatttatgttttctaacatcccggtcgcgattaagttttttcttatatcattcaaaaatattttcgcacaacatccaaacactagtttatttttcacaagtaatcatttgattttttctatctttgatttgttcaatattgcatacttatttcttttgtttattcttctgaaatggagaacaaatttgaactacctgacaatctcagtttttatttttacggcattcctgtatagaatgtttttttagcatatataaataaaccccctcaataggggtttttctttcatttcgttcactgtatacaattccttttatatgcttccgaaacaataccgactctagtacttacattccactttttacaaagaccggctatgatatattcgacattacgctgcgagtagtttaatgacttagcgatctctttattaggcttttcagcaattatcagtttaattactgaaatttcaatcttttttaattccaattcattttctactgctgttttcattctaacttcctttctaaagatgtatttactaaataataccctattatataatttttatcaataacatcaattattaatagtaaaataatatatttcttttactaacttctaagtagtttatatacaatataaaaatcccccgccatgtttcaagcgggggaaattctttctatttcacaaacccaagcagcatttcacggatcatcttgcttgccgtgtttgcggtttgttctgagtggtcatagaccggtgccacttctacgaggtcggcgccttttacgctgacctctgagcgcgcgatttcatggatggacgcgagcaattctttagacgtgatgcctcccgcgtcaaccgtgcccgttcccggcgcatgagcggggtcaagaacgtcgatatcgatcgtgacataaaccgggcgtcccgcaagctgcggcagcacttttttcagcggctcaagcacttcaaacttagaaatgtgcatgccgttttctttcgcccattcaaattcttccttcattccggagcggatgccgaatgaaaatacgttttgcggcccgatgagctcggccgctttgcggatcggagtagagtgggaaagcggttcgccttcataatccgtgcgcaggtcggtgtgcgcgtcaaaatgaatgatggcaagatccggaaacttcttatacatggcttttatgacaggccatgatacaaggtgctcccctcccatgccgagcgggaacttgcctttttctaggatgccgtccacgtattcttcaatcatatcaaggcttctttgcggattgccgaacggaagcggaatgtctccggcgtcaaagaaattcaaatcagccaagtcacggtcgaggtacgggctgtattcttcaagaccgatagacacctcgcggattctccccgggccgaatcgtgaaccgggacggtagctgaccgtccaatccatcggcatgccgtaaaggatggcgtccgcctctttccagtcggggcggctcgcgataaatacttttcctgaatatgcttcatcaaatctcatcaataattccctcgctttcctgtaaaaaagcgcaagattcgctcctgcgccgtacgtttttatttgattaagtcgctcacaaatttcggaagaacaaatgccgctttgtgaagctctttcgtgtaatacttcgtgtcgatgtcgaagaaacggctgtcctctacttcaagcggatcgtactttttagaaccgatcgtaaatgtccacaggccgctcgggtacgtcgggatattagccgtatacagacgggtgatcgggaagatttctttcacgtcacgctgtacgtttgtaatcagttccggtgtaaaccacgggttgtccgtctgcgcgacgaagatgccgtcttcttttaacgccttggaaattccggcatagaagccttttgagaacagattgacggccggtccgaccggttctgttgaatcaaccatgatgacgtcatactcattttctgatttcgcgatgtgcatgaaaccgtcatcgactctcacgtcgacgcgcggatcatcaagcttgcccgcaatggacggaaggaattttttagagtattcaataaccttgccgtcaatgtcgacaagcgtcgctttttttacgcttgggtgcttcagaatctctctgatgacaccgccgtctccgccgccgacaacgagaacgttttccggattcgggtgcgtaaataacgggacgtgcgcaaccatttcatgatagacgaattcgtctttttcagatgtcatgaccattccgtctaagaacagcatgttgccgaattcttctgtctccaccatttccagatgctgaaattccgtctgttccgtatgtaatgtttgtttcacctttaatgtaatgccgaaattcttcgtctgcttctccgtataccaaagctcgctcaattgtcatctccctttcaaggcttatttcatttattgtaagcgtctgtatcgcttttattccggttaaaatctcattttcacctaaggaaaaagtatagaggatggaggggaaaaagtaaagaagtgtccggtttgatatgtttaaaaaacccccttttttcacataataatagaatcatgaaaaagggggttcccaaaagtggataaagtatctggaaaacagctcagaatcacgttcaaaatcatccgcgcctgcatctttctgacactgatcggcggaatgctggccggcgtctgcttcacatccgttcttcttgcagcgaaatggcagggcgccccctccgtccgggttcctcagtctacgattctttatgcaaatgacggctcaaagctaggtgagaccgatttcggggaaaagcgctactgggttcggttaaaagatatcaatccgacagcggtgcaggccgcgattgcggtggaggatcaaaacttttacaatcaccacggttttgattaccggcggatggccgccgccgcgctggctgacataaaggcaatggccaaggttcagggcgccagcaccatcacccagcaatacgcgagaaatctctaccttgagcatgataaaacatggaaacgaaaatggaacgaagcattttacacgatccgccttgaacagaactattccaaaaacgagattttagaaggttatgtaaatacgatatattacggccacggcgcatacggaattgaagccgcctcccgcctgtatttcggcaaacacgccaaagatctgaacgatgcggaagccgtgcttctggcgggcataccgaaaggcccgtccggctattcgccatatgtcagtgaaaagaaggccaaacagcgccaggaaaccattctccgtctgatggccggacaaaaaatgatctcaaaagaaaaggcggaaaggattaagaaaacgccgcttgcctatcagccgctgaaaagcagaaccgcggcgaaaacggcgccttatttttacgatgatgcgatgaaagaactcgagaaaaagctcggcatgacgcgcgaacagctcgcaacgagcggattgcgtgtttatacaacgcttgataagcgcatgcagcggatcgcggaaaacactgtggcacatacgatccgtaccggctctgacattcaggtcggcttttccgcgattgatccggcaacagggcgcgtgcttgcgcttctcggcggacgtgactacgaaaaaagcccgtttgaccgggcgacacaggcgaaacggcagccggcttccacgatcaagccgcttttgtattacaaagcgattcaaagcggctttacaccggtcacgctgatgaaaagcgaagccacagagttccagattgacgacaacggagatacctattctccaagcaattacaacggctactacgccaataaaccgattacgctgcttcaggcgcttgcgttatcagacaacatttatgccgtgaagacccatctctttctcggcatgaataagctcgtgtcggcggcaaaggaattcggcatcagcgaacatttaaagccccttccgtctctggcgctcggaactgaacccgtgcgcccgattgagatggttaatgcctatgcgatgctcgcaaacgggggaaaacaaatcaccccttcctttatcacaaaagtgacggataccgccggcaaggtcttgtatgaacagccgcgcggacatcagcagacgcttgataaaaaagccgcttttgtgacggcgagcatgatgacgggcatgtttgatgaggatttaaacggctatacttccgtcacgggacgcaccatttcagaccggctgacccggacgtacggcgggaaatcaggcacgaccagcgcagacagctggatgatcggctttaatcgggctcttgccgccggtgtgtggacaggctatgacaaaagcagcacgattgattcagtagaagaaaaaagctatgcgaagacgatttgggcggactttatggagaaggcgctcgaaggagaaccggaaatagcgcttaaaccgccgaagggcgtcacgggcgtctatattgaccccgcttccggctacacttcgggacccggatgcgccgcaaagcattacacgtatttcatcgcaggcactgagcccgcggatgtgtgctacggaccggaaccgtctaaaaaagaaaaggaacacgtccccgcccgtaaagaagctccgcgcaaaaagtggtgggataagtggctcggcaaaaaagactgagcccggtgcattgcgcgccgggcttaatccgcgtcttcctcaagcacccatgggagcaagagtgaaaagtcgagatggataatagggtcaggaaaacccttcggtataaaaaatgttgtactaggcaaagaaaacgaaaagcggatatctcccgctctctcaatgtgaaacttcggccagccttccctaagcatgccgacaatcggatagctgcccgcataatgatgcaggccgttttcctttccatgctcccccaaatcgtgacagacagccggacgaatcccaaactgcgtaaacaatcttgttttctcggcgggaaggagattcaccgcctcggaaaagttccggcagctcccgcaatcgcagggatcagcccatgatttttcatattgttttctcgtttccgccgtatctgcttcaatgatccaaggcccgatgtcaaagacggtgaacatgatgaaacctccgcgtaaacatgaaaaaccccgagtcttggttcggctcgggactttccatgtcctgattctgtatcaacagtttactcagtacaattgcgaaatagtgcaaatatttataaagttcacaaaaagttcacaaattatttttcgcccggaagcagacctgttttcaattcatcggatgaacgttcccagagcccttggtcatgcttctgcagaaattcagcaagcacctgctttgagctggcgtccattttgtccacgataatgcggcgcttcattgatttatccattaaattcacatgctccggcaatgacttatagcctctgcggatacttctgtccacggtcatttcacaagccgtcacacccgcgtaataagggccttctttttttctgtcgatggtgacccacacgagccagtacggttttccgttcggcacttcatctttgttcggcaggaatttgatgcctttttcaacgacactgcgggcatgcattgcgccgatgtctacgaaagcttccttctcttccacatcgacaaataccggagaaatattgtcaaggctcagcgacccggcgccaaaaccgccatgtccgtcggtcggatcacttttaataatattaaatccgattgttttcttctttttttcttccatgaaaataccctcctacaaaagcggttgaaatataatggcaaataccttgagaatccagtctctcccctcgcttaacagcggccacacgacataggagccgaccggtgtcacaaacagcacgagaaacacgataatcccgtagctctcaaactgagtcattttggcgcgcacccgcggcggcacgagatcctcaataatccggtagccgtcaagcggaggaagcggcagcaggttgaataaacacagcgcgagattcagctgaatccaaatagagaaaaagcggtcaagccccatgctgaatgcagaaagcagctccattccgtaagcatgcatcaacactagcaaaaagaaaccgataaaggcaagaagcaggttgcttacgggcccggcgacggaaactagcactcccgccagccgcggtcttttaaaggcgcggcggttcaccggcaccggacgggcccagccgaaacccgcgaccaaaattagaatcgttccgaaaacatcaagatgtttaatcggattgagcgttaatctgccctgtctcgccgcggtatcgtctccgaaccgatacgcgacatacgcgtgcgccagttcatgcatcgtaaatgccacgatcagcgtaatcacgacatagggcataagctccagcggataatataaaaatctgtccaaatgtcaaaatcccctttttttaaaaatgcaagattgtccttcattcagtatactataagtgatctctcttccaaagagaggaaacgataaaggaggatcagcaccatgccgctcgtaaccgttaaaatgcttgaaggccgcacagatgaacaaaaacggaatctggttgaaaaagtgaccgaagccgtaaaagaaacgactggcgcagccgaagaaaagatcattgtcatgattgaagaaatgagaaaggatcattacgccgtcgccggcaaacggatcagcgatacggagtaatccttgataatggccggcgctgctatgtcaggccggcttatttcacaaccttttcaaccaggctgaaaaagattttcttttcttcctctgtcaatgcttcgaacagttcgtcaatgagcagctgccggttttcaatcatttgcatggccgccatttttcccgattcggaaagcgtcatccataccgtgcggcggtcttcattgtttctcgacctttccacgaatccttctttttctaaatgattgagagcggttgtcgtggcggaaggcgataatgtgacctcctgcaatatatctttaatcgtgcacgtgccgtgccggtaaataatcctcagaataaatcctctgatattgtttatactctttggaattgtcgcctcatcaagctttttcgtgctctttaaatatttcgtgagcgcgtaatccagtacatttgcttgcaagttatcgtgcttcatgcagaaactccccatttcaagatgcatccatcatcatttgtttgttttttattacattttactgataccttacggagaaagtcaaaattccggccggaatgcccgcaacttttatcctgccctgcacagacttttgtctccctcttttttaccatatccttttatgcaatgctggttttatagacacgattcaggtaaaatcattaagggtgactgcgtttgacggtaaggataatctgatcggatgcggcagacaatatgattggaaaagaaaagaaacggaacagacggggaaacagaacacaggattgtcgattacacagaagatgtgacacgggtaaaagccaaagagtccctcttggcttttgcttttggatggagggatgcgtgttgcggaatatcctacaaaaaaaagacatcacccagctgcttgaacaaagcagaaaaaggcagactgccaaaacgatgggtggatttgatttaacattactgggcatcggcgccgtcatcgggacgggcgtcatggttcttacaggcattacagccgcgaaaaacgccgggccttccgtaatcttttcttttatcattgcagccgttgtctgcagccttgcagcattatgttacgccgaaatcgcttctgttctcccggtttacggaagcgcctatatttactcttataccaccatgggagaaattgtcggccatttaatgggctggacgctcttatccgtttatatggtgacggcgtcagcggtggcaagcggctggtcaagttattttaataatctgttagccgaaatcggcatgcctttgccggacagtctgctgcacgtgccgagccaggggggatcgtcaaccttcctgccatcatcattactctattaattgccgtcgttctgtcacgcggctctaaagagagcaaaacctttaataatataatggttctcgtaaaaatcggaattgttttgctgtttatcatcacaggaagcttttttgtaaagccgggcaattggcatccttttatgccttttggaattaaaggcgtcattacgggggcttctgccgtcttttttgcgtttctcgggtttgacgcgatttcggcttcggctgaagaagtcaaaaaaccgcagcgcaacctgccgatcggtattatcggttcactggtgatctgtacattggtatacgtcatcgtctgtctcgtcatgacgggtatggttccgtattcacagcttaatgtgccggaagccatgtcttatgtgctgcagactgtcggacaaaacgcggtggcgggcattatcgctgccggtgcggtgatcggactgatggccgtcgttcttgctcatacctatgcggcgacccgtatatcttttgcgatggcaagagacggaatgctgccgaaagtctttaccattgtcggaaagaaatcgggagcgccgatctttaatacgtggctgatcggactgatcagcgcatgcatcgcgggttttgttgatctgaaagagctgtcggatctctcaaacatcggcgcgctattgacatttgccatggtcagtctgtccgtactgattctgcgccgcacccataaggatctgccacggggatttaaagtgccttttgtacccgtactgccgattttggccattatctgctgtttgtttttaatggtcaatctgccgctgaaaacgtggctttattttgccgtctggctgatcatcggcgtcatcgtttactttttatattcgtacaagcacagcaaattgagacaataaacaaaaccaggcccgcttcatcgcggcctggttttttcataaaaaaagacgaaagcatcgcctttaacaaatgtgtttcagctcttctatgtagtgaagcgcctcatcatattcttcatccgtatatttctgtttgctttttatcgtaaacactttctctttcttttcctcagcttcaaggccgtcaaaatacaaaatcgtagacaccagctccagaaaccgggatgagcggctgttgacgctgtcgatgtacttcttcatatccggcatcttaagctccgcatgatgtaaaaactcggctcccgtctccgtcagcgagtaccggtattgaaagtagccgccctttttttccttcacctcatccagaaacccaagattgcacagctcttcaattcgaagcgtcagttcttcggaatacgggccgtaaaaatgaaaatcatatttttcgtagaaaggatactgcattttcttcgcgatataaatgattttctgcagctttttccgcccgatgatttctccagaatccgagaacaccttcatcagttttgcatgttctttcaacaaattcccgacatctccttttccttctttaccaaaatccttctatgtcagtcccagcagctgccggatttttaattttgcttcagggttttctgaatcgtcgcaaatgaggtccatcggatagtagagcttatggtccgtccggcgtttgcccgaaatggattcgacaatggcggactgcctggacagctctttgatctggccgttctgcgttaacagatgaatcggcagacgctcctcctcttcacccggccggtaaaaatcatacggcagatccgatgaagaatcgaccactaaatagtaattgggatcaattcccgcctctttaaagagagcggtcagttcaaaataagccgacatttcctcattcggattaaattcggcatattgaaacagctggcggttaatgaagcggcggcacaagtcggacagaatcgggtcctcttcttcctcccaagcctggaaataatataaaatgatggcttcatcaagcttcagataatccgcaagcgtcagcttcccttcaaaaatggaataaaaatgaacgggagcatgagtgaatatatacccttcttcatggagctgcttcgcacggtggagaattttcgtcaaaatgacttcagcgcttctcgtcacgggatgaaaatacacctgccagtacatttgatagcggctcataatatagtcttcgacggcgtgcatgccgctttgcttaatgacgatctggtcctctcgcggacgcatgacccttaaaatccgttccatatcaaaatgtccgtagctgacgcccgtatagtatgcgtcccgctgaaggtaatccatcctgtcggcgtcaatctggctcgaaatcaggctgaccacctgtttgtttttgtatgttttggcaatgacttcggcaacatcctgcggaaatcccggtcccgcctttctgagaacctgattcacctcggtgtcgccgagaatgatttccctcgtatagtcttcatgatccagatgaaaaaccttttcaaaggaatgcgaaaacggcccatgtcccaaatcgtgcaaaagcgcggcgctgagacagagttcgcgttcattgtcatcccattcaggacgccctttaaaaacatcatcaaccattcgtctgacaatctcatagacgccgagagaatggttaaaacggctgtgttccgcgccgtgaaacgtcaaatacgtcgtaccgagctgtttgatccggcgcagccgctgaaattcacgggtgccgatcaaatcccagatcagcttgtcccgcacatgaacatagcggtgaacgggatctttaaacactttttcttctgataattttccgtttggatacgccatcgtcattccctcttttttttagccgtgattctattatatcggctctgtaatttgaaaacatccttgaatttgtccggcgttttgttccagttttcaatcattgattttttgaagcaaaaaagcctgacccatcgggcgaggctgtcgtaaaaatgcacatttactttttgatcttctttttcactttctcaatcagctcgtcctcagtcggcgccgacagcgggcggttgtttacgaaagcaaacgatttcttgcgtccgggcccgcaatatgactgacatccgacctccacttttgcatccgggtcagcttctttcaaacgcggcagcaatgtcttaatattggtggcctggcaatcatcacacactcggaattcattagccatgatgtacgcttcccttcattcaatgttcctctatgttaaatcttaaattttaaaaacgaaaaaaatcacatcacgttttattgtacaaggattcatcttatcctgcaaggctctgcgtatctctcattctttcagccaatttgtataaatattttccaatctggacattctaataccatcaaagattattgggggttgagaacattgacaaagcaaagacaggacgcctggtcggaggaaaatgacctgctgcttgcggaaaccgtgctccggcacgtccgggaaggaagcacgcagctgaacgcctttgaagaggtaggcgataaattaaacagaacgtcggcagcgtgcggattcagatggaatgccgtcgtgcgccatcaatatgaaaaagcgcttcagcttgcaaaaaaacagcggaaacagcggatgcgcgcgctcggaaacggccagccggccaagaagaaactattataccagccgcctgcaccggatgcggacatcattcaagaaaccgcagccgaagagacggttcaaacggaagcgccaaaagaggatcggcaagccgtcatgtccggcgaacatatgccttatgtcgatgaaagcttcaaggaagagttagctagtttatcacatttgctggcgcctcagcagccgagccaaaaggcggagctcacaatggcagacgtcattcaatttctgcagagctatgaaggcagcggaaagcaaacttccgccctgcagatggaaaatgaccgtttaaaacgggaaaaccaagaacttcagtctaaaaccgagcagctggaagcggccgtcgaaaaacttgaaaaagatcaaaaaaccattcaggaagactacgaaaccttggtgaaaattatgaacagagccagaaaactagttttatttgaagacgacgagcatgcgtctccgtcctttaaaatggaccggaacggcaatttagaaaaaatggccgaataacgcaaaaaaccccttttcttgtcatggaaaaaggggtttttgccatttgtcaatgacgcgcatcctgatctatattaatgtaaacattgttcaggaggccttcttcccgcaagggctgcgcatctcggtccccgcccgcacataagcataaagattcaattcctcatcccaaatggttcttgggaattattgatcgattagctactgtgcaatacactgtatagagaatacaattattagatatgatgggaatgatagtaaatgagtagccaattacgaaaaggagcattggaactttgtgtgttgtccctgcttctttatgaagatttatatggttatgaattaatcaaggtcataagtgaaacgttccctgtatcggagggcaccatctaccccatattacgaagacttacgaaaaataactatttaaaaacgtatacagcagcttcagatcaaggcccgtcacgcaaatattacaaagtaacagaagaaggcgccttttatcatcacacattaaaatcggaatggcttgacctgtccgaaaaagtgaacagcatcattaaggagggaaaatgaatgtgtaaagaccaatatttaaaacatctccggcgggaaataaaagatctgccggaatttgagcaaaaagagatactcgccgatatcggcgaaatattccaaatgggcgtcgctgaaggaaaaagcgatgaacaaatcgccggcaatttaggaaaccccaaaacacttgcgcgcgccttaaaagcggatattttcatcagtgatgccgaggagcagaaaacatggcgctcctttttcaaagcattcggcctgatgctgggtatgggcatgttcaacttcatgtttatgctgacaccgtttctttttgcctctgttgcggtgttaagtttgatggcaatcggcctgatgctgatgaccggatcattctttctcctcataaaagtgccgattgtaacagccatttttaacggatgtatggtcctcggagcgggtatggcggtgtttatggccggatttgatctttcgaaactgatattccgcatctttttgcgctatttcaaatggaatgtcagcattgtaaggagggaaaccattgaatcgaaaaatgtggtatagcattgctctcattttaatcgctgccggcctgatcggaagcatgttcttcggttttgacggcttttaccctaaatcataaggaaggtgtgcaagtagcatgagtgaaccagccctgatattaaaagatgtctctaaaaccatcaatcatacccctattgtacagtcaatttctttcgatgtgagaaaaggcgagatattcggccttttagggccgaacggctcaggtaaaaccactattttcagaatgatcgtacagcttattaaaaaaacagaaggagccatttcattcagaggcagaccggacagcgactttgaatattttatgagacatatcggggttatcattgaaggcccggatatgtatccgaatatgaccgctttgcaaaacctaaaatattttactaaactgcgcagcacctcgctgcgaacggatgaccttatgaatacccttgcaaaagtcggactggagcaggctgcccgcaaaaaagtgaaacatttctcattaggcatgaaacagcgcttggggctcgcttattctcttcttcacaatcccgggttattaattctggatgaaccgatgaacggtctcgatcctaaaggtatgaaagaattgcgcatcattctttccgatttagcgaagcaaggggtttccattttattatcaagccatttattgtcagaaatggaggagatttgcgacagggttgcctacattaaaaagggacggattttaggaattgaagacatgaagagcagaaatgaccttggtcagaaaaagctgtttaccgtcacggtcgatcatccggcaagggcgaaagaaatattagagcaggacggtattcttcaagtacagcaaaaagacagccgcatcattgaattggaagcggaggaagataccatcccgtatatcattaaaactttggcagagaaagagattctgatttcccgcgtttctgcaaggactttgtcattggaagagaaatacatgatgattacagatcaggaggacgcggtatgagcatatttcatctgacgcagaacgaattcataaaaataacccgaaaaaaaggcacacttttatctctttttttcctgtttctcatcgttttgctggccggccttattatgaatcatgagttagatgcttcctcggataacaattggaaagaacggcttctcgccgaaaaaaaacaggaagaaattaataaaccggctgaaacggcaggcgtttattattctgctgatgttaagaataaagactattatttggagcataacatcaacccttatgaatggaacggctggaggtttttcggcacggttacttcaaacgggcttgagattttcgtaagcttgactgcgattttaaccgtcagcggggttgtttctaaagagtttgcccttgggacgattaagtttatcgctacaagcccgaaccgaagatggcggattttaacatcgaaatttctggcctctcttctgtttaccggcatggtttacttattttactgtgtgagctgtttgctgatcggcggcgtgttattcggtttttccaatgcttcatatccgctcgtctatactcatttaaatgacagtctgtataccatcagttcaatcaaagcatccggaatcattctgcttttgcgtttcatatcaattataagtattgtcaccattgcgttcactttgtcagtattgtgcaaaagccaggcgctctccctttgcttatccattttactgctgtttgccggcagtatattgggcggaactgatttgcttgcccaatttacatggtataaatttacactctttccgcatttaaacctcgttgcttatgtaaataaaagtgcgggtgatgcgatttcaacgttaaacatcccctattccgtgacggttatagcgatctactttcttatttgtttattgatttctttttccgtctttcaaaagagagacattacagcatagacagagaggcggcggcataatgagcggacggcaggaaatattgacggtccagcaatttgccgctgaccgccccttggtccatcgctaatggatttaaataaccgaagcttccgctgcttcgctgctgaaagcgtagaaattcccgcccttcccgtataaaaagcgcctcatcgaatcggagaaatttcataatggctgtgtattttgcaacggcgtcaatgtgatactttctgcactcggctaacattaaacctgaaaaagcaaagtctgatgttttgtaccattccgtgagaaaaggctgcaattttttcatttgcaaataagagacggcataaagggcatctgcctgctcttcctggatgctgcccggtgccatgagcaaatcggcctcacgtttcattgcggtttctaagaaaacgatcagttcttccggggtcaccgccccaaaataagctgctaacaccatgaggatcatagaggaaggctctgatttcagttcctcttgtaaaccgcggaccatttgttcaagtccgttatgaaaaaagatgctttttgcggcattcatcctgcggtatatatgatacgcatacgcgaacaggaccggatggcattcgtgcgttttttctccaaaataacggtctaagaatagaatgacttcttctgtatcctttcttttttcaaagtgatgacatgccgctaaaccgcaaaacaggtgcatgagatcatctgcttccatttcttccggctgcagctgaatgttcttccaaaaacccagcagccattcttctgttttttttatattaaaatgttccttgactatccgcatgttccacactccagattcagaatctcaatcgccggcagaagagccggagcacaatgaatggatggattctcgttatttatatgatgaagagccgcttgacagccataaaaaaatggatcgatacacgattggataaataacatattgcacagctgtttcatttttcggctgccgagacaaaacacaagccatttttgaatggacgccttcaagccgggatgaagcagatgctctccctgatctaaatgaagaagacagtactcgacaaactccagctcgttttcagctgttcttttccatgcgtcatggagcaaaggctgaaatatcgaattcttgtaaaagcgcactttttcatggtcagttgacattcccagctcgttcagcaaaccggcgaattcggcgtatttaaaataaggccattctttttttataagatagccgttttgcaatccgtgacgtatgacttgatcatccgaatccattccctgcttctttttataagcttttgccgttaaatagatatgaatcaactcattgacaatggccgtgttacagtgaaacagatcttcccagcatgacttatcaacgaaagcggaggcaatcctttcagtatgttcttttacagcggaagaatggctcgtctttctgtagtatttgcagaagccggcaaacagctgaatgctcttttgatccggaagcgattgttcagcaaaagataataaaaattgatccgtctcttcagctaatctgttcaagttaatcgttcctttctgctctaaggcaggcatgcgcggcacccgcggcgacaagtgttgtatgatagcaatgtttaaacacatcttctcttcgctgttcacctttcaaaccgggtttatgttgataggtgatgctcgggacattcccctctttcatttggccccgatagattttattccaggctgcttcatagagcggtttatggttgtccttatccatgtcgatatgtaaaaaagagctgcacatcaataattcactggtaatatctaaattctcaagacagatatagatcccgagaaatttcaggaccttttcttttaaggacgacagatgatactctttatccgtaagagaagaacatcccatgtctgttatataaaaaatcgtatgagtgatactgtatgcatcatgatccgtcatatatgtatttgggatatcctgaccagctgctgtgtagtgatataagtcagaaaaatccgttatttccgaggttacgcctgctctttgcagactgtacttcagatccatttttcgaaagggaattttagcaaggctgcaatcaaaacgcgctgccgtgaatttttccagctcccatatcactgaagcttgtgacggatgatcagtcaaggtaagaaattcacccgcaatagccaatccggcgagaccgtccggatcaaaatgaataaattcttcaagctgatcattacggagcctttctgtaataaactccgttaaaacagcaacttccttatcatctgcctgatttctgatcaggtaattggtaagaaaaatgagttctataaatgttttaaggcgccatctgaaatcattcgctactttatgtttcatatcaaaataatggatattttcaacaatccatgacagtgctccccgcttaatttctcttatatactcttgtgtcacactctcaccgcctcgtctcgaatgcgtaggctccaaacagtcattatcttacttttgagcggctaaatcagagaaattcaaattcgggttttgattgtcttcttggctcggcactacaagcacccagccgctccaagcgaaagaattgcctgattgttccgcatctccggctaacaaatgtgtagggatcgtgattcttttttcttcttttatttttttaaagttcatatctccatctccttcagtttatagaattatttggaacctacataaatatattaatcaaataaggtatataatgtaaactagttttgatataacgattctttttcactataactgaatagtatataattaccaaaaataaaaaagcccggactcagtccaagctttcctgcgtgccgaacaccttctcattccgttccagcattcggatcagatttttttcaaataccatttcctcttccggcgataatccggctgcatacaggcgtccgctgagttccttcagttcagtcaaaagcgccagcattaagtcctgcacggtaatgtccgtttgcagcaattcgcttaatgaagccatcgtttcgggccggatatcgggatatacgccttttgtatcgttgcttttgtcttttaaagcggcttgatagaaacgtctgatcagatcggcgcgttcgcttccgcttttatcggcacagaggtaaatctgaaccgcggttccgccccgcaggcgtctttgtgagattcccgcgaattttcggccgccgatgctgagatcatagctgcccggacagtacgatcctttaatttcatatgcttcaatttcggcattgtacggacacagcatccgccgcaccagctctgtcatcgcctcgtagcctctgtcaatgtcgatgccttttttctcatcttcaaaaataagagaaatattcaatacgccttcatcgagaacgaccgcgaggcccccggaattgcggacaatgacacggtagccttcgccctccagcaatttcacgccgtcctctaaaaacggcaggcgtgtgtcctgaatgccgagcacgatcgtccggtggtgcacccaagtgcgtgccgtcgcaggcgattcccctttgcctacggaggcgcacagcgtatcatccattgcgaatgactgcttcgcatcaaaataagggccaaggctggattggtcaatgattctccagctcggctgcatcagtaaatcaatcggttgctttcccatctatattaaatccctttcgtcataagctttccatgcgtttattatatcactccgcttgagatgattgaaattggcttttcaaaagagcgatgaagatttctttgttttttgtgttctccataatggaagattggatgatagacagtttccgttttaaggagaatccttttatctcaagcacggaaatgctgccgtgaagcagatccttttgcagcacgctttttgacagaacggaaagacccattccgctgatcacggcttccttgacaccctggttgctgctgatcgtcatcatggatttcggccgcagtccgtttgattgaaggacgtggtctaaatattccctcgttcccgaacccttctcccttgtcacccacgcttgattttgcaattcggcagccgggatgttttttctgccggcgagcgggtgtccgttcggtgcggcaatgcacaattcatcctccataaacggctgaatgtcgagctcgtttttccccgtatgcccttcaattaatccgatatcggcttgaagcatccgaaccgcttcgctgacctcctccgtgtttccgatcatgacgtccaggttcagctcgggatactcgtcatgaagctttgcgagaagcggcggcagaatatattcgccgatggtaaagctcgcggcgattttgagcttccctttgacataatgatggtgggcgtaaatttcagatttcgcctgttcgtacaaaaagaccatctgcttggcgcgctgatagagaatgtccccgtcggcgtcgtcgtaaagtgcttcggagagcggttcagcaaagcggtttgaaattctttctccaggtttttaatgtgaaggctgacgcttggctgagaaatcatcagcttctgcgccgcctttgtaaagtttttttcttccacgacggcaatgaatgttttcagttccccgtaatacaaaaagcatcgcccctaatcattatttttcctaatcgtttagatcatataaatatattttactaatgattaagaccgcagtaaagtggagttatcaagataatgggaagtgactgagatgaagatgataaagggtatttcagttaccgcaggaattgcgtttgcggctttctatgtcagccgcctgccgtttttgcatatgctcggaatgcttgtccttgccatgctgatcggcatgctctggcgcgccgtattcggacagcgggcggcattagagccggggatcgcgttctcaagcaaatacttgctgaaagcaggcatcatcctgcttggcatgagactgaatctggcggatatctatcatgcgggctggcacgtatttgcaattgccgtctgctgtatgatgtttgcgggtgccgttgtatacggactgtcccggctgttccgtatagatcagacactcagcacgctgacagcctgcggcacagcgatctgcggggcggctgccattgccgcgatcgcgccgcagatcagatcaaatgaaaatgcagccgccatcagcgcggccgccgtttcgttattaggaaccgtttttactgttgtatattctcttgcttatcatggattggggttttctcctgcggcttacggggccttttgcggggcaacgcttcacgaagtggcgcatgcggcggcggccggcagcgccggaggaaaagcagccgtcgagatggcggtgatcgtcaaactgacccgggtcgcgctgctcgtcccggccgcattcatgctcggaatgcgggcgcgccgcagcggaaagtcaaagacggcttctgccgcttcgctccccatcccttggtttatcttcggatttctcggaatgagcgccatccatacatcaggcgttatttcagcttcgttttccgcgtttcttgttcaagtgtcttatgttttaatcggcatggcgatggcgggtctcggtttgaaagtccatatatcggcgtttcgtcatagcggctggcgggcgctcgcagcaggcttgatcggttctctctgtttgtccctgttcggctgggccgcagtgacattctttctataaaaaaagccggtcctcgtaaagaccggcttttgcggattacagcgcttgagcagccgtaattaacgcaagattgtagacgtcttccgcattacatcctctggaaagatcgtttacaggcatattcaatccttgcagaatcggtccgaccgcttcaaagccgcctaagcgctgagcgattttgtagccgatgtttcctgcttcaaggcttgggaatacaaatacattcgcgtctcctttaatgtcggagtccggcgcttttttctccgcgacagacggcacaaatgcagcgtcgaattggaattcgccgtcaagcgtaagctcaggcgctttttccttcgcaattttcacggcttcagccactttgtccgtctcgtctgatttcgccgatccttttgtagagaagctgagcatggcaacgcgcgggtcaatgtcaaacatttgagccgtattggcgctttcaatggcgatttcggcaaggtcctggctgtcaggagcaatgttgatcgcgcaatcagcgaacacatactgctcgtcaccgcgggccatgatgaagacgcctgatgtttttttcacgccttcttttgttttgatgatttgcagtgcagggcgcaccgtatcggctgtagaatgtgcggctccgctgacaagtccgtccgcgagacctttgtacacaagcatcgtgccgaaatagttttcgtccagcaaagctttgcgggcctgttcttccgtcgctttgcctttgcggcgttctacgaaagcctgaacgagttcttccatgccttcatatgtatgcgggtcaaaaatgtccacgccgtcaagcgtaagatttaattctttcgcttttgcttgaatgtcttctttattgccgactacgatcggctttaataccttgttgcccgccaagttgttgaccgcaaccaggatacgttcgtccaacccttcaggaaatacgattttcacatcttttcctgcgactttttcttgtacttttgtaaataaatctgccacgatattccctcctctatgttgacaaaaaacgcttacttttacagcatactcttcttccagctaaattcaaataaccaacttctattatagcgctttcaaaaagaaatcttatttttctaactaatttaattgacggtttgtttcacggcttagtttctgacacaaggcttcggattattcaaggtttctccacagccgaaacggttaaactgtgatatagtgaaggcatcaatgtaatgaaaagatataggagtgaagatacatgagtgagcagcaaaaaacgaacgaagccgcccaaacacttgacggctggtacgcgcttcacgatttccgcacaatggactggacgtcatggaagatgttatccagcgatgagcgcctgtcgattattcacgaatttacgggactgcttgaaaaatggggcgtcgcccaaaaagaaggcaaaggctcgcaaaccatctacagcatcgtcggacagaaagctgatttcatgctgatgattcttcgcccgacaatggaagagctgaacgaaatcgagcttgaatttaacaaatcaaagcttgctgaatttacgatcccggcttactcttacgtgtccgtggttgagctgagcaactacctcgcaagcggagaaggcgatccgtatgaaaacccgcatgtccgcgcacgcctgtatcctgagctgccggaagcgaaatacgtctgcttctatccgatggataaaagaagaagcggcaacgacaactggtacatgctttctatggatgaacgcagaaacctgatgagaagccacggcttgatcggacggagctatgccggcaaagtcaaacagattatcacggggtctgtcggttttgacgattacgaatggggcgtcacgctcttcagcgatgatgtgcttcagttcaaaaaacttgtttatgaaatgcgctttgatgaagtcagcgcgcgctacggagaattcggttcattttttgtcggaaaccgcttgtctcttgacacgcttccgaagtttttgcacgtgtaacacccacccgcctgtccggcgggttttttctttgtcagaatttaaataaaatttgctatttttatcatttttttttacgatgtaaaggagattccattttggtaaaggggtgcagacagttgtcaaaacgaaccgcatttattatgggagccagccaggggatcggcaaagcgatcgctctgaaactggcggacaatggctttcataccgtcattaattcacgagttcccgaaaatatcgaatcggtaaaagaagagatcctcgccaaacatccggatgcgggcgtcaccgttctggccggcgatatgtcggaccagaaggcgagagccggcatttttgaagagatcagatcacaatgcggacggcttgatgtattgatcaacaacattccgggcggctcgccggatacctttgaaagctgcgatatagaggatatgacaaatacctttacgaataaaacgatcgcctatatcgactctatgaaaacggccgcagcgatcatgaaacagcacgaattcggcagaatcattaatatcgtcggaaacctatggaaagaacccggcgccaatatgtttaccaacagcatgatgaacgccgctttaattaatgccagcaaaaacatcgccattcagcttgcgccttttcacattactgtcaactgtctgaatcccggatttatcgccacagaccgttatcaccaattcgtaaagaatgtcatgaagcaaaacggcatttctaaagcggaagcggaggaacggattgcctcaggcgtcccgatgaagcgtgtcggaactgcggaagaaaccgcggcgctggctgcctttcttgcctctgaagaagcctcctatattaccggacagcaagtgtcagccgacggcggcagcatgaaaagcatataataaaaacatcccgctctcagcgggatgtttcttgtaatgaaggaaaggacaaacctagcttttgaatccgcagcacgaattcccttaaatcgccctgttttgccaccattgatattctgacataacgctttccgccgctgccgaaaatctcgccgggcgtcacgacaacatgggcatgctccagcagatagtccgaaaactggtgtgaagactcgaattcattcggaatttcagcccagacataaaaagtccctttcggtttttcaatgctccagcctaattccttttcacataacgccgtgaaaaaatcaatccgttctttatatgtgcgcttcagacgctccgtatgctcaggatttcctgacagcgccgccgctgccgcctgctgaaggccgccgaacatgccgacgaagacgtgatcctgaaactcattgaccgcctgaatgattttctcattccccacggcaaatgccattctccagcctgccatattgaaggttttcgaaaatgaataaagctccgcgccgaccgttttcgcttctttcgcctgaagaaagctggccgggttctgatcaaattcgaacgcgccgtatgcaaaatcgtgaataagatggatgtcatatttttttgcaaacgcagccgctttttcataaaacgcctgatccgcagtcgcgcccgtcgggttattcgggtaattcaaaaacatcagcttggcttttttcaggacggcgggatcaatccgctcaaaatccggcagatagccgttttccggatgaagcggcatctcatgcagctccgctctggccattgtgattcccgataaatactcagggtagccggggttcgggactaaggcgatatcgccggggttcagcaggcattgcgtcaaaacgtacaaacctgctttccctccgccgaacagcgcgacttctgtctccggattgaccgataccccgtactctctctcataaaattccgcgatggcttctttcagaaacggatagcctctgaaagggccgtatccgtgatatgaaggattcagcgcagcttcccgcaatgcttcaacgatatgcggcggagtggggagatcgggattcccctggccgagattaataatctgggctcccgttttctccatctcttttaccttttgaaaaacgagcgaaaattcctgtttcggaagtgtcttgatgacatcggacggtatgatttccatctggaaggctccttataaatggatttgctctgattcgttattccgttctgaaaaggatttattgaccagttttgtatgcagaaacagcccgctgaccaaaaggacgataaacgccatgatgactgccgcgtctacaatgttgatcagcatggaaccggcggcgatgcacaatccgatggacgcctccgccaccgaaaagatccggccctgaatctggttcgcagcgttctcctgaactttgacctttgccagcacttcaccgtattccattgcgataaagaaaagaatggcggcaatgactgacacggcgaaaatcggggtaaacaaaaacagcgcaagcgagacgatcgataacactgtaaaatacatcagccctttattgttgttaaagccccatttgctgacaagagcggcgccgataaagccgccgaagccgatacagaacgtcaggatgaaattgccgatttccccgtcgcctaaaaagcggctgacaatcgggaaatagctgtagacgacaccccacaaaagcgccatcgtaatcatcgtgaacatggcgtttaacacaaaagcatttgttttgatttccttcaggccttctttaaacgactgaaaagcttctcttacgttttctgactgaatcggcacgtattgaagcttaatgcggctgatgaaaaacgcggagacaagataggtcaccccgttaaacgcgacggcaagctccacagaaccgcctaacagaaaaagtccgccggctgcagcgccgacaataatcgaaatcgtcgtggcttttgcaaacaaagtgttgatatttttaatatccgcttctaaagacgacatgaccgcgagacgtgccgggttaaaaaacacgccgcttccgtacgagacaaacagcagcgccagaaaaagcagcggatattcgcctttcgggagaaatgtcagccccaaaaagatgacacctctgatcacatccgtccacagcatgattttcaccctgtcgagcctgtccacgagcacgcctaaaaacggctgaaacaccatcggaatgctgcggaccgcgataacgccggacgtcacccagtagtcatgatagtatgtagacaaaatgagcagggccgggagaacgcaatagtctcccataaacgaaagcgcctgcccgaaaagcaaatacttcgagttcggtttcagctgtttcataccggtaacgcatactttgcagtcagcttcgcctgctgctgaatttgtttgattgattcggccacgtcacccgaattgcttcctttcagctcaaacgccgcaatgctgttgaacgcttcgaacagccgcagatccacggatgtacccgcctcggcagccgagaaagaaacgagttcggtgtctccctttaagacgccgtcgggaatgtcaatgctttcaatgacgaaatcgacagctgtctcaggcagctggccgttctctttgaaatgctgaggatacaagtggcagtcggcgacataacatggctcctgctccaataatcctttcggcagatcggcttcttttccgaaacagagaacatccaataacagctgcgccatgtcgacgccgaagacctttttaatattcggaatcatgttccagcccgcaaatcgcgccgctgattcaatcagtccggcttcccggtttttcattaatttaatttctgtatgtgtcgcgcagttttcgaggccgagtccttcattcgcctttttggcagcttcgacaattttccgctttgcgtcatcatccaggatggacggcgtaatatgcgatgtctccgtgaatccgatttgcggtgttttatcatgaatcgccacagggaagtattccccgtcggccatgatgccttctatgctgatatagtcggaataaccgcttgtttcgtaccagtcgtcatactcgccctgcaaaaattcttccgcgataaaaggcgcttcaaacgtgaccgctttcggtacgttaatcgacttcaggtattcattgactttgttaaattctgcttctgccgtttccctctctttgatgagcgtcacgccgatggagctcgccagatatgtaggcttcagaataagcggcgttccgatttcctgaagcgcggcgcggaaatcttccagcgtcgtcacccgtttatttttgatagacttgacgccggcccggttgaaggcggctctcattttgtttttatctctggcattttcagcggcctgtacgcccgctccccgcaggccgagacgttcacacgcttttgccatcggagcgataaacagttcattgttggtcgtaatggcgtcaaccgcgaacatgtcagccaccttgacgatttcttcgacgacttcttcctcaggtttgtcatgatcttcatgagcccagtaaatcgaatcgggatgctcaaaatcagccagactcttaaaatagtctttatctttaatgaccgcaatcgagtatttttcaattaatgccgcatgagaggctgtaattgcaaaaggtctcggaataaagctgacgaggttgtatttttcggctgcgcttttgtaaaacatatgcggcgggcatcccccaaggtcagcgataaccaatactgtttttctctccatatgtaaacactccttctctattgtgcggtgtatccaccgtctgcggtgatcgcgcttccggtcatatagcttgataaatccgaagcgagaaacagcatgacgttcgctatttcttcaggcttgccgagtctcagcagcggattgactttcgctttttcttttttgatttcttcaagcgtgccttcgttgttttcaaggaacgacttttcattcaaaggtgtgtcaatgattcccgggcacacgcaattgacgcggatgttgtgtttggcgtaatcgacggccatcgaacgcgtcagctgcagtacgccgcctttagaggcgttatatgcgggaatgtcgggccatgcgacgactcctccgacggagcacgtgttaatgatattgcccttgccgcttttgagcatatacttgagcgcgtgcttgctcataagaaacatgcccgtcagattgacgttgagcactttgtcccaatcgctcagctccatctcatgaatcggggcgacaatttcgatgccggcgttattgattaacacatccaatccgccgaacttgtcaaccgctgaccggatggcgttttgacatgccggttcatctgtaatatccgtctgcacaaaatgcagcctgtcattgttttctttccggatcatcgcttctccctgcgcctcatcaatatccgcgacgaccacattcgcctcttgattcagaaacgcctgaaccgcggcataaccgatgcctgatgcgccccctgtgatgaggaccgttttatccgtcaggttcatgactctttcgcctctaattttttcgcttttgctctgttatagcgcggagggaaaaagatattgactgattttgaatctttttcaaatctgttgatggcgccgtgatcttctctcggatcgcagaaataagctgtaccgaatgtcatatccactttgcagccttcaatggtcatatcatagccaccgccgatgcagatgccgatctgttcattgcggtgtttatggaacggcatttctcctccgttgcccggaatgttggcaagcatgatttccacccagtcttccacgaagaacgtgacttccatcccaggcaataagtctctcgttttaaaaatattcaaaaaataatcctcagggcttgtataggtttcaccggctttcaggcgtttaatatcaatggcgatcacttctagatccgtctcatttcttgcgccgtgaggcacgttaggaggcgcgatataggctgattccagcgctgtcatctttcttgtgacatctccgacagtcatggacagctcgccggaaacgacaaggccgatttggacttccttatgctgatgcggttccacgtttgtatgcggcggaacgtaagaaagcagaacttccgtatcgcctctgacggacgaatattgtcttactccgttatcccattctattaatttaggcgtcgggaaataaagttcctgcaaatcttgttcagttttcatcatgaatctctccttttccgaataatgaccagctcatgggaatgcttttaaatgttttgacaaagtgaaggccgtacttttgtctggccagctcatttgtcagcgcgatgtcggacaaaccgtccttcactcttttcgcggctgcgctcgttgagttcaccagatcaaacgtgacatctttacgggtaaaatacttaatcaaattgataggagacgggtgggatacgatgacagtcttatcaagcatgtcatccgtatattcaaaaccgggccggacagccaggccgtacatcggggtgtcgcacctgaaaatttgcagaagctgcagatccggtctcatgtagaagtgcttaatgccgtcatacgcgtgaggcacaattgtgtattccagcggactttgaagcgttttttcaatgcacgattcaaatgtatcatgcaatgataatttgctgttcaccccttggagaagggtgaaattggtgatgaagttttttgctgcgtactcactgcttgtcccttcaggaccgagcgtgttgatcgtaatcagtttagatattgaataagccttgctttttgtttgaatgctattatccaatataatcatgagcaccaaccaatctgttaaattttaagtaaatattatccatagacgttcaagctgtcaatattatttgaaaatattgataattattcctatatattagaaaacaccttataatataaggtgttaaaaatttacatttacaaaattatagaaactttattttaccgatacaatgattggtcggtcttatgctcatattttccataccttctgtatgcgaaaacgctgaggacaaagccgatgagggtgacggccgcacagataaatccgacagctgcatatccatatccgacatagaccggacccatgacagcagaacccaaggtgacggccaaattggacgccagactgtaaaatgccatgattttgccccggcggctctgtgagcaatcacttaaaatagtgctgagcaaggtcaccgtcaggctttgcatcaatccccagacgaataacccgatgaccaaaaacggcattgatgacggcgcataggcgagacaggaaagccatatgctgatcacggccaatgccgcgatcaaagagcgcattttccccgccttatctgcgatttttccggtgaacacgctcatggaaaaaccgattccgtacaccatgatcagcagccctgaagctgtattcccacccggcagcacgcggtgaagatatgtgccgagaaaggaatacatgccgtaaaaaccgatcatgttgcaaaaagtgatcgtgagatatacagggacacggggcaccttcagcgcatcccggaaagtgcctgcctgccgtccgttttcctcttctgttttattcccatccgccgtgctgcggcgcgcctcaatgaaaatgagcgaagcaacgaggacagacatgagggcgaaaatccaaaacgtccaccgccaattcaaaacgccgccgataaaagagccgatcggaacgccgaaaatcaaagcgagcgaccagcttgacacgatcagacccatcaccttgccgcggtacgcataaggcacacggtcgccgaccaccgcatatgctgtcggcacaaacgcacccgccgcaagcccggaaagcgccctgcccagaaagaagaaaaagagattgtgcgccagcgcgcagatcaccgtgccggccgtaaatataagcagtcccgccagcagactgagttcccgggaatatttatctcccagcggaacgagaagcggcgccccgataaaaatcatcactccgtaaatactgatggaaagcgccagcacactgacatccgagctgaaagcccgcgctaaatccggaagcagcggagaaatcaccagctcttcagaacccgcggcaaatacgcctaatgtcaaagcaagcgcgagacagaccggaaatcggcgtttcgtttcgatgtgatcggtttgtttgctgttcatgctctttgaacacctcttccgtaaaacttttctatcttttgttgttttatagtttagcatccttatatttcattttacatttcacatgaaaactaattctgattttttatttacattcagatttttaaataaaatatttagtttatattcaataaatgatataaaatacgccgtctggttatgctatagtgatagaatcatttgttaaggtgggggtcatgaaatgaataacgctgattcaaaggccgcccgcgcaggcctcggcatggtactgattctcgggacgctcgcttcattcgggccgctttcgctcgatatgtatctgcccgctttgcctgaagtggcggccgatcttcatacgacagcgtcacttgcgcagctgagcctgacgttttgtcttttgggtctggctgtcgggcagatcgttgtcgggccgctcagtgatatgatcgggcgccggaagccgctgattctgtcattgctgctttatacgctgtcttctttattatgcgccttcagcccttctgtttcgtttttaattgtcatgaggtttattcaaggtttcaccggggcggccggaatcgtcatcgcacgggcttccgcacgcgatatgtattccggaaaagaattgacggcttttttctcattactgatgctcgtcaatggggcggcgccgattttagcgccgattacagggggatttatccttcagttcgccggctggaaaatcgtatttatcgtgctggcggtaatcggctgtatcatttctgccgccgtgcttacggtgttgcctgaatcactcccgccggaaaagcggacaagcggcggactccgggagacgctgatgacgtttcgcggcctgcttggcgaccggatgtttatgggatttgcgctcagccaggcatttgtgatgaccggcatgttcgcatatattgccgggtcgccgtttatactgcaaaacatctacggcgtatcggcccaaatgttcagcctgctgttcgccgtaaacggtgcgggaatcatatgcgccacccaaatcaccggacggatggccaaaacacatgatgaacggaagctgtttgtctccggtctgatgattgccgtcatcgggagcatcgctttgcttttatcacttgcgtttggtttaggcctggcggcagtctgcatttctttattcatcattgtttcttctgtcgggatcgtcacgacgacgggattttctttggctatgcagaaacaggagaaaggcgcgggaagcgctgcggctcttctcggactcctgccctttatcggcggtgcggctgccgctccccttgtcggtattgccggagaagaaaatgcctggccgatggccgtcagcattttcggttttcagttctgtgccgttctatcctatgttctgtcggccaaacgaaacacaaagtaaagcccgccgctttaagcgaagggctttttttcttatccggcagcgcctttttccgaagaagccggctcacgcttcaggcgttttttgataccgaagtgataatacgcgtaacagatgatcatcagcgggacaccgcagtacagaccgatacgctggtcggggataaagatgagactgattaagataagaccgtaaaccgaaaatccgagaatcggcacgatcggataaagaggcgttttaaatgccaggtccttcagatttcctccttcagcgagaaagcgtctccggaaaacgaattgtgaagcgcagattgacatccacgcgacgacggtaatcataccggagatggaaatgagccacacatacaccgtttcagccgcgactacacttgtcagcagggataaaccggagatggcgatggtgatgaaaagagctttcagaggcacgccttttttcgtcagtttcgttaaggaagcggggcccatcttagtttttgacagggaccacatcattctggacgaagcgtacagcccggaattcgccaccgacagcatggcggtcagaatgacaaagttcatgatatcagccgcataaggaacgccgattttatccagcacagccacaaacgggctttcgatgacgcctgccgtttgatacggcaaaatggacacgagaacaaacatcgccagcacgaagaaaaaaagcgtccgccatatgacgtttcggatcgagcggggaagcgtcttttccggattttcgctttctcccgaggcgattccgaccagttcggtaccctggaatgaaaaattcaccataacaagggtaaacagcacggcttgggcgccgttcggaaaaagccctttgtccgtcgtaaagtttgacagatacggagccgtctgcccgccgttaaaaccgacaaagccgaataccgcagcgcagccgagaataataaacaatacaatggccatgaccttaatgctggaaaaccaaaattccatttccgcaaaactccgcgcagacagcgcgttaatggaaaaaatgacgacgccaaataccaggcaccacacccaaatcggaacggccggaaaccatcgctgcattaaaatccccgccgacgtcagctcaagccccactgtattggcccagctgaatgcgtacatccatccgatcgtaaatcccgtcgacggcccgagaaactttgcggcatacgcctgaaatgatcctgcgaccggcatggcaaccgcgagctcccccaaacaaagcatcaccaggtacattaaaaatccgccgatcacataagccaatatcgcgccgatcggtcccgcttcactgatcgtaaaaccggagcccagaaaaagccccgtcccgatcacgccgccgagggcgatcataaacaaatgccggcccttcatcgtgcgctgcaattcattttgattggtatctccctgcatatacatccccttattccgttatgtcagccatttgtgcgtatgtctaatcggcagctgtgcaaaaggtgcattgtcgtctgctgaatgagttccggcagcacatggaatgtgtacggtttgtacacgcgttccgtccatttatggccgtcctttccgtatacccctatattgaccgacggaatattcaattccctgatttcattaaaaggaatcgtcccgatgacatcccagcccggaaaattatcggtaaaggcggagacctcctcatctgtttcatgcagcgataaaaagcttccgtccgccaaataagggaaaaactttttaaagacgaatgtttctccggttgatgccgctgttttatcgaccgcttcttgaatgacatgctgcaaaagccggtcccgtgtgctttcttccttcagataattgtgcggaaggtaaggcggcgcatagaaaataatgaccttggctccctgctcaggatcgagtttttgcagttcttcgacggctttaaaacatctcatccgcagttcaagatgttcatatgttttaaatgcctgcccgatacactgtgcagggtctatcccgcggcttctcagccttttcaggtaatcttccagactgtacacttgaacgttccatgacatctcttttttcggcaggctcgttctctcacagtattcgtcgtaataatcagataatttttgttctgtctctttgcaggcttcgtcagccacggcggtcagctgatccatgacttctttggcggttttctcgtaaataaaataattaaaatagacatagctgctgacggcggtctgcacgttatacgcttccttattgtcacgctggtagaggcaggtcggcggaagcacaagctccccttcaatgttttccgccatatgaatattgttgtgaattcttctggtgatttctgacgcgatcaaattcggatcgatgccggacagcgtatctccgacatgcacctcccgcccgtaaatcgcaaagcaaggcaaaagcttccctgccgcgcccgtgtatatgtaccttgtcgtgtcaccctcatacagcggcgtgataaaatcgttattaatcgctgctaaataacgaagctgcttttcttgtttcagccgttttaattcagaaatgctggttaaaatgccggaatgctggctttcttcatccgggtttgccatgaacagaatatggcccggcagctgatcgcgccgttcagaaaagtgaagcagattggcgagatgaacggcaataccgctctgcatatcaaccgaaccccttccgaacatccactcgcctgagcgggcgtcccgctgcacatcccgatcaaattcatagtttgagaaatattccgcgagacggtcggaatcaaaagcgatatcttttaaagggccgaaatcctcgatgccgaccgtatcaagatgagcgtgataaatgaccgtattcaggctttcgccgtttccctcaataaatgcgaaaatatttttgcggccgtaagggtcctcaggaatcgcctgctcccacacatgtgacggattctcctgaaagtagggaaagctcttgatcatatctttgatatagtcggctttttttccttctcccaatgtgccgttgatgctgtttaacgccaccagtgatttcgtaatggcttctattttctcctccggaagcattttgctgagctgctgatacatgttccatcccccttaccctcatatagagaaaatagcgcgactctctttttcatcgcgctatttccgaaagattaataggcttcagacgttgtttttgcctgcatatgaagaatcagatagtcaggtcctccggcttttgaatcggttcctgacatattgaagccgccgaacggctggtatccgacaatcgctcccgtacagccgcggttgaagtatagatttcccacgtgaaaatcttcgcgggcgcgttcaatgtgcgcgcgggttttcgataacagagcgcccgtcagtccgtaatcggtattattggcaatctcaagcatatggtcgaaatcacgggcttttgagatcgcaacgaccggcccgaaaatttcctcctgcatcaggcgggcgttttcatcaacatccgcaaaaatggtcggctgaataaagtatccttttgaatcatcaccttcgcctcccgtcaggagttttccttctgttttgccgatttcgatataactcatgactttattataagatgcttcgtggatgactggccccatgtatgtatcaaaatcttccggacttccgacggtgagtgattttgttaaagcgacggctttttcaacaacttcatcatagacgtcctgatgaatgaccgcgcgcgaaccggctgaacatttttggcctgagaatccgaaggcggaatacacgattgaggaagcggcaagatcaagatcagcatctctgtctacaagcaccgtatctttccctcccatttcggcaatgacccgtttcagccacttttggcccggctgtacttttgcggcgcgttcatagatgcggcatccgaccgcgcgggagcctgtaaacgacacaaatctcgtcttcggatgctcaacgagatagtcgccgatttctcctccgtcgcccggtatgaattggagcacgccgtccggcaggcccgcttctttcatcacttctacgaatttcgccgccacgacaggcgccgcatccgccggtttcagcagtatcgtgttgcctgttacgatggcggctgccgccgttccggccataatcgcaagcgggaagttgaatggagaaatgacaattcccaccccaagcggctcatagtgatactgattatattctccgtcacggctctttacaggagaaccgtctttcagcttcagcatctgacgggcgtaatactctaaaaagtcgatcgcttccgccgtatccgcatccgcttccttccacggtttccccgcttctttcaccaggtacgcggagaattcgtgctttcttctgcggatgatcgccgccgccttaaacagcacattcgcgcggtgttccggccgtacttttttccatgtttgaaatgcctgcagcgcagcctgcatggccttttccgcaagttcttttccggctgccgatacagaaccgatcacttcttttttatctgccggattgacggaaatgatctttttatccgtttcaatcgcttcaccgttgatgataagcggataatgcttgccgagctgtgaattcacataagccagcgcttcctgaaacgattgtttatttgtctcttcctgaaaatttgtaaatggttcgtgtgcgtatgaaactgtcattagaattcctccccgtattttgtaatgtgtgctcacgcttaatgaagatgcaagaagcataccagcatagcaatttgtgataaaaataggaaaatctttgccgaaagcggacgaagcttgtccgaacctgtcagctgcaatctgaaaacgcaaagaaattttgcgatccgctatataactgatgcaaaatctctttgcggataacacttatacccagccgcggaaccgggccgcttcagccgactttctgatgcccgtcatataggcggccaaacgcatatcgactttgtgggtatgcgctgtctgataaatggattcaaacgaattcaccatgacgctgcgcagttttccggcgacttcttcctcagaccagtaaaagccttgattattttgcacccattcaaaataagacaccgtcacgccgccggcacttgccaaaatgtccggcacgagaagcacgcctctttcattcaggattttcgtggcgtctatcgttgtcgggccgttcgccgcctccacaatgattgaggctttaatgtgatgggcgttttcagccgttatctgattggagattgcggcaggcacgagaatatcacagtccttttccagcagctcccggttcgttatgacatcagagaagagattcgtcaccgtgccgaagctgtcccgcttatccagcaggtaatcaatgtcaaggccgtcagggtcatacaaagccccgtgggcgtctgagatgccgatcaccttggcgccggcgtcatgcataaatttagcgagaaagctccccgcgtttccgaacccctgaatgatgatccgcgcattttccaacggaatcccttttttcttaacggcttcctcaatacaaatcgtgacaccttgcgcggtcgccgtctcccgcccctgtgaaccgccgagaacaatcggtttgcccgtaatgaatcccggtgaatcaaattctctcaggcggctgtattcgtccatcatccatgccataatctgcgagttggtatatacgtcgggagccggaatatcctttgtcgggccgacgatctggctgatcgcgcgcacatatccgcggctcagccgttccagctctccgaatgacatcgtccgcggatcacagatgatgccgccttttccgcccccgtaaggaagatttgtgatgccgcattttaaagtcatccagatggaaagcgccttaacctcttcttcactgacttccgggtgaaaccgcacgcccccttttgtcgggccgactgcgtcattatgctgtgagcggtagcccgtgaaaacctgtactgagccattgtccattttgacggggatgcgtacggtcaaaagccgcatcggctctttcatcagttcatacatattgtcaggatagcccagtttgcgcagggcttcttttatgatcgattgtgtggacaagaacaaattaagaacttctttttcttcatctttctgagtgcttttagaaagcgggttggctgacatgttttatcacctcatcgtattttacgtgtaagcttcaattaccggcagaacgaaatgtaagcgcttttacaccaaaacccatcaatccctttcacattgtcgttacacccctttttatatgcaagattcatgccaggattttgcgcataaaaaaagaggctgttgtcagcctctttcatcccggattaacgcgggtcaataaccagctttgtttcggcgtagagactgccggcccccaaaccgtttacgtaatcgcctttaattgtatacgtgcccgcgcgcggaaggtttttacgcaccaggacgagattgtattcagacgcgcccaataagtcaagggtaagcggaagtctgaccgtttttccgtagttgagaatttgcgtttctttcagtgttcttccgtttacagagtccctcacagtggcgttgaacccgtcaggaaattgaaattcaacggcgccgacggcaagcagcgcattcggcttgtatgtgacttcaatatcagacgtcgcgtattctttcgtactattgacggttttcgcttcaataacggcagattgggcgttcgcatgaaaagatggcaagaacacagctgaaaataccgcagcactgatgagaaaggcagaaaatgattttctttttaacatcatgaattcctccagatcatataggattcagagcgtcctctgccggaaaagcgtgtctgatgattccattcgcgaattgggtttctcttttcctgagaataatctaccacctttatccatggaagtaaattattttttggaatattcaatcatttatttttcacgagatgaaccagcacaaaaaacgaagacatccgctgtcttcgtcttgtgcgctaccgatgagccgtctgccagtcaaatccgatgctctcatcattccacgggattcttttttcgtcaggctgatccggattgtaggacattgtcgtgaaataaataatggtcagcggggtttcgcccagcactctgtacccgtgtgcgacgcctttgggaatgagaaggagcatcggattgtcttctcccatgtagtagacatccgtttctcccttggttgccgactcttcgcgaaggtcatgcagcacgacctgggcgtggcccgtcgggaaaaaccacaggtcatcctgtttctcatgatagtgaaacgctttaatgacgccgggatagcttttggaccaggaagcctgcccgaaacgctctaagagatgttcatcgtcacggacgagttctgagaaaaaaccccggtcatcgctgtgtttgatcagctttttaatttttacgccttcgatcacttgcactgtccctccctttgtaaataatcctttagcgcttcccgccaatgcctcatgccgagcccctgccgttcaatcgactcaagactcaacaccgagtaagcggggcgcggcgtctcatttccgtattcctccgtcgtgacgggcagcacggcggcggttctgccgctttcttcaaaaatagccttggcaaattcataccagctgcacactccgctgtttgcggcgtggtacaagcccggcggcctgtcaaacagaccgatcaccgtttcggctaaatcctttgtgtacgtcggcgctccgacttgatcgttaacgacacgaacctgatcatgtgtatccgcaagtttcagcatcgtattgacaaagttgtgcccgccgctgccgtacacccacgacgttctgataatggtgtggttttttcccgttaaccggatcagttcttcgccgagttttttgctttttccgtaaatcgtgcccggatctgcgggatcatcggtctggtatggccgtgttcctttgccgctgaagacgtaatcggtgctgatgtgaatgaatttcgcgccggtgttttcagcctcaagcgcggcataataagcgccgattccgtttattaaatacgctttgtcgagctccgtttcacatttgtcaacggaggtgtatgccgccgtattgacgacgatatccggcttgtaatggctgaacgagtgccgcaccgaacgctggtcggatatgttcatcatcgcttttgtcaaggcgatcacttcatacccttcccgcttcagctggcggcataactcccgccccagctgaccggccgctccggttactaataccttcgtcaatcggatccccttctttccgattagtcttggctgtctgtataccagcgaatggttcttctcattccttcttcaaatgtgacgtcctgccgccatcccagctcatttttcagctttgaagcattgatggcgtaacggcggtcatgcccttttctgtcttcgacatgagcaaaccgttcctcgacaccgagctccttcatgataaatgacgcaagctctttattcgtccgttcatttcctccgccgatattgtaaatttcgcctagtgttcctttttccagcacgagcttaatggcgcggcaatgatcttcggcaaacagccagtctctgatctgcatcccgtcgccgtacagcggaaccggcgtgccgtttacggcatgcctgataatggtcggaatcattttctcgtggtgctggtacggcccgtaattgttgctgcatctcgtaatgatggcaggaagcttatgggttttcacataagacatgacaagcaggtctgagcttgccttgctggcggaatacggattgttcggagaaagcggcgtcgtctctgtaaaagcgggatcatccggcgccaaatctccgtacacctcatctgtggaaatgtgaatcagcctgccggcttttccctgtaacaccgcgtcggccagtcggtatgtgcccatcacatttgttgtgatgaacggctctgcctgatttatgcttctgtccacatgggattcagccgcaaaatgaatgacagcgtcatacatttgggaaaagactttgtcaatgtcctctttttcagaaatgtcacctttgataaaacggaaacggccgttcttttttaaggcttctatttcaagcggcctgcttgcatacgtgagattatccaggacggtaatctgcgcatctgtttctttcagcatcatctttgtgaaggtaaggccgataaatccggcgccccctgtaattaaatatgattttggcatgattaatgctcctgtcctttctgtaatgcctgatgcgccaggcttccggcgagatagagcgattcatgcgtgcccgcatccacccaccagcccgttaacacatcatacgtcagctcactgtgttcaatgtataaattattgacatccgtaatttccagttcgccgcgttttgaaggagaaatttgttcaatataagaaaacacttctgcgtcgtacatgtagatccccgtgacgcatagtctggtcggcggctgctccggcttttcaatgatcgacttgatccgtttgttttcctcatcaatctcggcgatgccgaagcgctccggatcgtcaacttctttcagcagcactttcgctccttttccctgctttgcgaaacgctccgtataaggttttaatgaatcttcaaaaatattatctcccaaaagcagaacgaacggatcgcgcccggtaaaccgctttgcgtatgataaaccgtcggaaatgccggatgcggctggctgaacctgatatgtgattgagacgccgagctcttctccggtttcgagaagtttatgaaattgcggaatatattctttttgcgtaatcagcaagatatccgtaatccccgcttcttccagcttcatgatcgaccagtaaatcatcggatatggaccgacagggagtaaatgcttattgaccgcttttgtcagcggcataaggcgtgagccggtgcctccggctaagataacacctttcacatgaacacttccttacgtgtggttttatcacaaatcataaagaatcgccgccgcccgtttaatgcccctgccgtcaaccagcggctttccgttctgatgaagcccgagccgtctcggataatcagcagccagctcagacatatgccgagcgagcacgtccgccgcggtgtgttctcccaggccgagatgaacggcggcctctcgtgcggcgaatttttccgccgtctcagtttgatgctccacttgagaaagaacgatgcagggcacacctgtacaaatggtctcatataaggtgatcccgccggacacgatggccatatcagccctcgtgagaagcgcggccatgtcatttgtctgccttaccatctcggcataaggcatttgtgtgagatgcgcgcgcacgtcatcagcatgaggcgccgcgccgcccatgacgatgatcactcgtttccgctgaatatcagggatgcggcggcatgcttccatcactttaaagacaagcttcttcgggtcgcttcctcctaaagagaccaatatggttcggcattcttttctcagctgatagagctgctttgctttttcaaaacccggatgaagaatcatataatccgggccttcatataccgcggcgctgcccatttgaaccgtccggcttttcagcccgccgtaaatgccgtttataacggcatcgcataaatgaatgacatgttccctcttttcttcaaataagacgatacgagccgatgaatgctttttgatttcctccagccagtcacacggcatatcgagcagatcgaatatgagaaggtcgggagcccgcgtgtttatttcccggacaataaattccttctgtcccttgtcaggcttgatgatcacttcccattgatcagatgatagataagaagaagcctctttatttgtgtagaacgttattgagcagttgttcttaatggcaccggcaagcagcttcatccgaaccgcgtgccccatgccgatgtcacggcccccgtccgcgaaaatcaaaacccgcacgctaatcagcctctttttgccggatcatttgattaatggccctgagctccggatcacgattcagcagatggatcaattcttttgccggaatatcaggacgcgagcccgcttttacgtacagctcgcgggccagcctgtagtcctcttctgtatcgacggtcatccgcaagtgaggagcccggagttcctgcgggggctcaggaaagagaagccggtacctctcaggggattctcttatcaaaagggtgacatgctcctgatatttgtccgccagcgttttgtccgcattgatctccgttaaaaggcgcgcgttcaccgcctcgccgccgatcccgagcggtgtaccgcagatatacgtgtagtctgcgtgctgatctaaatgcgattgaatcagaaaatcaagcagcgaagggtcgacaaacgggttatcccccgtcagtctgactgcgatgtccggttttacttgttcgatgacttgtgcaaaccggtcaagcacacgctgttcgctgccgcggtggacacggtagcggttgctgaggcagtgcgcagacagaatgtcgtcggtcttgctgtcagacgcggcgacgatcagattatcccgtgattgatcgtaaaacgcactttgacgaacccttttgacaatcatatcgaggatcgtatacccgccgatcggtttcagcactttgccgggaagacgcccgcttcccatccgcgcctgaatgataaacaaaatgtcagtcatcatatgggctgcctttcgtcaaaaggtcatcccaagtgatgcccgtgtcggcggggatatccctgaccgcacgcgcgccgtcagttaaaagctcaaaatatctcgggtgaagcccctgcggtttttggccgggacgaaggacggcaaggttttccgccgtaaaatattcgcctttttgaatcggcgctgttgaaaaaatgcctctgtaagcaaaccttctgatatccccttcaatcggtgtcgtcgttttatgggagcttcccgacagcacttccggcaccggagcgtgatgcccctgccgcagctccgcttcaactgagcggatcgccgcaaccatttcttttaattcatccggattgagggcgaaggagtgatcagcaccgggcaggtttttatcgatcgtaaaatgcttttcaatcagtttcgctccgagcctgacagccgcgcacggcacatcatacggatgggcgctgtgatcggagaaaccgatcacagcatccgggaatgcggcggcaagcatgggaatgacgctcagattgctgtattcaggcggcgcgggatatttcgccacacaatgcatgatcgcaatttctttgttcccctcgccggtaatggtttgataagcctcctgaatatctgaaatatcagcgcccgcggtggaaaagataatcggggtcttcagccccgcgacatatttcaataacggcagatggttcagctcgtaggaggcgattttaaaagctgaaggggaagtcgcatacagtaagtcggcagagccttcgtcacataccgtgcttaaaaacagcacgccttttttcttacaatattcaagcagcggttcgatccactcagcgggcatttccattgattgcaccaaagaaaaaatagagacgttttttcccgcagcggttttgtataagccggggtctttctgatacattttgtcagcctgaaacatttggaacttgaccgcatccgcgccggcctcactggccgcatctatcaattcaaacgcctggctcagttttccgtcatgattaattccggcttcggcgatgatgaatacgggcgaaccttcgccgattgacttcgttccgattttgcatgatgccatcagtccgcctccttcccgggccacacatgatagtagtaaaaggacgcatccgctttaaatcccattctttcatacaggcggatggctcttacattgtggagctgcgttcccgctgatacagtcttatgctgaaagcgcaatgattgttcaatcacgtgcgcagctaaatggaatcccgctccttttccttcaaatcccggctttaccgccatcagatcaaggacgaattcatcgcctttagacagcccctgaacaaagcccgcggtctctcccttatatttggcgaggaattgtaacgaagctctgccttccgcgttattccgcgcccactcttcaaacagacggtttgcacttttatagctgagatgggggtcctgataatacctgctttttgtaaaggcgtcgcgggccagccggctgatcgcttccgtgtcgccgggtccggcttctgtaatctcaaacggcggcgtgctgttatatacacgcaccggactgacgagcttgagaagactccctacaaaataagcgttcggaagcgactgcacgacctgcatcgcgccgatatcttcagctggtattttaataaatataaaatcagtgccgtccgcccgccttgccgcgtaaaattcctgaaacagccttttgagctgtccggtgctgtttgcggctgcaagcttcacattgatgatattttttcggaacaattgactttcccacgaagagttttcatataaaatcacgccttgaaggctgttttcttccaataaacagagcgacgattcataggcttcgggctgaatgcccttctgatgcaggaaggcatgaatcatgtcctgtgcaagattttctctcagtctgtacacctaatcagcccctttgacgatatccgtaacggctgcaatgacgtattcaacgtcatcatctgtcattgacggataaagagggagtgatacggtgcggtgataatacgcggccgcggccggaaaatcagtttccttatatccgtacgttttttgataatacggatggaacggaaccggaataaaatgaacacttgtgccgatattatattggtctttcaaagcggaaatcagatcgttccggctgatcccggcctcctgctcctctatttgaagaacatacagatgccatgcatgccgcccgtcatcactgacatatgggacggtgagccctttcatgtctctgaaagcgtcctggtagcggctagcaatttcagcccttctttgctgcatgctgtcaatccgtttcagctgatgaagcccaagcgctgcctgaagatcaaacatattcattttatagccgggcgtttcgacctcgtagtaccagcttccgtttgaagaatagcggttccacgcgcctttgctcatgccgtgaaggctgagcaccctgatctgatcggcaagcccgtcatcgtccgtcgtcagcatgccgccttcaccggttgccaggttttttgtcgcgtagaagctgaatgccgtcgcatcaccgattgatccgatcattttctgtttataagtggtatacacggcatgtgcggcatcctctaagacaaataactgatgcttttcggcaatggccaaaatttgatccatatcacacgactgcccggcgaaatgaacgggtacaatcgcttttgtccgcggggtgacggccgcctcaattttttcagggtctgcattcagcgtaagcggatcgatgtcagcaaacaccggaacggcgcctgtgtgcacgattgtattggctgttgaactgaacgtcacggcagacgtgatgacctcgtcgccgggaccgatccctttcgctttcagggccaaaaacaaagcggcggtacatgagttcagcgcgatcgcatgctttgcccccgtccaggcggcaaaggctttttcaaacgcctctactttcggtccctttgaaagccagcccgattcaagtgtatcaataacctcctgaatttcgtccttcccgatcatgggcaatgaatagggaagaaaagctgatcttttttgcaccattttttttgcgctcctatcttttttatgaagggtcaacccgtctgaagctgactccggttttttcctgaagcacttgacataaagcggcaagcgaatcctgaaccgggtagttcgcggcgacaaaagcacggcgcgcctgttccgctttttgatattctgcggggctttcgcatatccggattaattcctgagcgagtgcctgcgggtcctcaaaaacaaattctccaagtgaatgataataagggtatcggcgggttcccgctgattttccgatcagcacgggcttttgaaacagcatcgcttcaagaccgaccgttgatgtctgtgtcaccgcagcgtcaacaaacgggagaatatcatacagctccatctcttttttgatgattttgcctgctttatatttccgcagcacctgattgtaagcatccagcttgtttttgccgatttcccacggatgcggtttaataatgagctgcatgttcttttggccggcaagctcttcaagcactcccgtataaaattcatcagaaaacggctgcgtggcgatcagcaccgtccgctgtgacgggagaaaagaaagtttgcggtaaaacgtgtcccgatctatcggctctcttgagaaaatctcgtcgaaacggggatgccccgtgatgatgatttgttcctccctgcagccttttgctttataccactccgcttcataagccccgaatacagcctgatagtccgtaaatacgggcagaaacgcttcatctcccatgagcgccccgtgctgaagacagatgctgacggcgttttttttcgcggacatcagcgccagcacacggctgtaaatatcctccgtcgtgccgactacaacggcggaaatcttctcggccgtaaacaaaatatcaacggcgtcaatcgcttcaataaataacgggatgtctttatacagtcgttcctgaaattctctgtttccgaaagcgggatggctgtgaagctctttcaaaatggaatgggctttttcaatataagggacggggttccctttttgccccattcccgtcagctccaatttgcagataacgggcagcccatgatggtcaggcagactccatctggccagtaccgctgtttttgccggatcaaactgccggtaatttccctcggtgaaccgaagatgatcgaaatgcagaatgacttttccgtttaccggtttctcatctgttttcttaatgttttgccttttttgatcataataaggctgaataccggcttcaggaatatgctgatccgccggaccgaaaagctccgggttctgctccatgctctcccgaagcgccggactgatatattgataaaaattactgatcaatgcgagcgggatgtctttgtagcgaagtgactgaaaaaggtcaatatactgccggtacagcacccaatagttcgctaagtatgccgacaagccctcacccctttccaagcttttttaatgattccctcagctcccggcacgtggtctgctgcggaaggctgttcacaaactcgtttttctccgccgcgaaaagctgataatggatggattgatcggtaatataattgatatcaagttcctcagaaatcgggtaaaacggataaaaatgattcactctccagaaaaaacgggcgtcaccgatacggtaaaacgcggggctttcatcccaataggaaccgaatgccgatttgacctgttccagcacggaaaaccggtgcatgaccgaacaatggtcaatggcgcacggcgcgttccacacgatccgttcggcgggcctggccgtctccttcaccgtctctttccgctgattcagatgataggttttggaacttgaatacacgacggctttttccgggtcttcatcaagctctttcaccattttctcaagccgttccggcacatacgtgttgtcgtcggtcgcatacgtcacgtactcgccctccgccatttctattgcctgattaatcaaggcggcgtagcgtgttttttccgttctttctttgacgcccgatacatcgctttgataaaaccggacgcggtcatccgtgagaaaaggacgtatttccgccaatgtctcttcatttgagttgtcatccataatgaacagctcaaagtccgtaaacgtctgagacagaatacttttaatagagcgggccacatagtcacttttgttatagctcgtcatgatcactgacactttaggcaactcgtcacccccttttcgcacctgaaactaccgctatcatatgttccttatgcggaagatgcgctagggatacagactattatgtgaaaagtcagcattgcgcgcacaaaaaaagccggctctgatatccggaaacattggatcgtattttcttttttcgcataaatctttctttgggctcatatggtggaatagataaaaacagcagccgctctgtcggctgtctgatacttgtcaggaggtttcagcatcaagaggttttcatcaaaggaggaacaatatgaaaccgaaaaagaatcaatatcagcaaatgcaggggatggggatgggaatggatatgcagggattccagccgcagctcgggcctaatccttatccgcagcctcagggccaaggatcacaaatgatgccgatgcagcagcaaatgacaatgccgatgcagcaaggccagcagggcttcggcggggggttccccggccagccgcagcagcagggcggcggcagctttcaaatcccgtcaggtccatcatcgtcacaaaacgttcccggcatgctgccgattgaagagtcatacattgaaaatattctgcggttgaaccggggcaaaacggcgacgatttatatgacattcgaaaacagcaaagaatggaattcaaagattttccgcggtgtgattgaggcggcgggacgtgaccatatcatcatcagcgatccgaaaacgggcacccgctatctgcttctgaccatttaccttgattacatcacatttgatgaggaaatcgcttatacttatccgtactccatgtcttcttattctccgagataaatcaaaaagccaatcgctcacttgacagaggattggctttttttctttataaatatttgacggccgcgacgataatcataatccaagagatgataaacgccacgccgccgagcggtgtaatcgcgccgagaatggaaatctgcgtcacgctcaatacgtacaggcttcctgaaaacagaacgatgcccgcaaacatcagccagcccgcaacagaaacactgcctgcgccagagagcttttcagccaaaaacgcgacagccagaagaccgagcgcgtgatacatatgatattgcacgcctgtgtgccacacctgcaaatatttatcggggattttcccttcaagcccatgcgcgccgaaagcgcccagcgccacggccaataaagcgttaatcgcaccaagaataataaacactttcatctatttttctcccgccttttcgttaaagtttccaattcaatcataacccaacatcggcaaaattcaacgtccgtcatccgatgacacgagattgtcggattttttctttttgataagctggattcggtcaatcgctatcgccagcagcgttccgagcacaaggccgttgcttaagagcgaaatcaggatcggatgcatccctgataacgcgctctccggcacaaacattacgccgacccccgtgaggagcgccagaccgataatggaacggattcgtttttgctccgctttctcataagagtcaaactccgtaaaggcaagacccgccatcgtggagaaaacgacgaagtttaccgcaaagccgaccggtgagggcagactcgcaaacgcattcataaatagcgggatcatactgatgatcatgacaaatacacttcccaaaagaaacggctttttcgaaggaagcttcgtcgtctcaataaaaccggccgcccctgaaatcggcacaggcgcaatgccccctgacagcccgctcaaaaggtggctgatcgaagccgcaaaccctgccggacgctcacgccgtttcccaacggtgccgccgaattttttcaccgccgcttctacaacccggatgctcgcgagcatgttgacaatcaaaagcacggtaatgaagagtgacgtaatgatcaggccgctgtcaaacacgggttttccaaacggaaaaagaaccggcagctgaatcacgcgatccggtatttgaatcggtttggcagcgccgaagacggcgaataagatccatccgccggcaagcgaaaggagaatcgcatactgtcttaagaacgtaacattcgatcgggacatgatgaacatcgccgccgtcacaaccattgcgagcccgaatacaaggccgtcgacgctgttttttaaatagccgatgcccaaaaggcctttcacaatcggctgactcagctgcatgaccaacagcagcagatacacaccggtcacaaccggcgtaaacagcacggccagccgttcaatcactttaaaaaggctgaacaaaaagaaaaagacagcgcttaataacagcgccccctgcagcgcccgcagcgtctcgccgaatgtcgcaaacaccgtgcccgtcagtccgccgtaaatcgtgtatacgccccaccataagcctgccgggctttcattaatcggcagacgatgtccctggagacattggatgaccgcagcgacgccaagcacaaaaaatgtgctctgaatcaatgcggcagaatcggcatggttcaagtgaaatgattgtgcgatggcgacaggaactacaatcgcagccgcaatcataaatgccgtccattgcaaacccccgagtatcagtttcaagtcaatcaacctctcctgttaaaaatcgaaaatggaatccccgtttccgtcttcctcacgttcgtctttcgcttttttctgatattggttcagcccggcgctgcccatcattttttcaagcagcagcgggtctgtcgaaggagacgcggaaggtttcggcgccgctttcggaatcggattctgcacaggcgccggagcggtgtgcgtctgagtgccgagcacgacatcacacagagagcggatggcggccgcgtgcattttgacctcctcggtgcgggtcgccgttttcgcctgcctcagttcttcttccatcttctgaattaaagcagagatatgtatgttcatgagtaaatcctccagcagtaatttgtcttcttcctgcattttatcaaatttctgagcggatcgcagaattgagtttgttattttttctgacggcataccgcccggaacatcaaaaaagacgcttccgccgggcggaagcgcctcaaaaaaccgtttattgcggcaggtcggggatgcaccaatcgatcggctgctcccccattttttcaagggcggcgtttgtacgggaaaacggtctgctcccgaaaaaaccgttccttgccgaaaacgggctcggatgagtcgattcaataataatgtgtttcgatgtgtcaatgcgctcttttttcatctgcgcgtgacgcccccacaggataaagacaatcggcttctctctttcattcaccacatcaatgatgcggtcagtgagccgctcccaccccttgcctttgtgggaattggcctgaccgcggcgaaccgtaagcactgtgtttaacaaaagcactccctgcttcgcccagctgacgagcgatccgtggttcggtacggggcagccgatatcgtcctgaagctctatgaaaatatttttcaaagacggcggctgtctgaccccgggctgaacggaaaaactaagcccgtgcgcctgtcctggcccgtgatacgggtcctgtccgagaatgaccgcttttacatcctcatagggcgtataatgcaaggcgttaaaaatatcatggctgtcaggataaatcgtttggctgctgtattcttgtttcagcatctctctcagctcttgataatacggtttgtcaaattcatctttcagctgattccaccagctgtcttttaaaagctgtttcaaactgtccgtcccccttatgaactgtgcagtcttgaatggacgggctttccgtcccacacaatgtcagtcggcgcctcccgcctcttcatgtccggctcttctagaagaaccgcgaagtttttcgtcgggagctccccaagcccgtgcttttcgcttaaccggtctaagtaccgcttccgtttgccgccgagatccgcggactgattgccgcctccctcaaaaaacgcatatatgacgctcgcgcaaggaacacgcttcacacggtgctgtttcgcggcgcgcaaataaaagtcccagtcccaataattatggacatccggatcaaaataccctaacgtgtcatgcagagaacgtctgtacatgctgcctgacggaacgtacgtggaaaatacccgcatatccgcaaaatccgccgtataggcgaacggctttcgtgacaccgggtatctcgtgccgccccgttcttcaaatgacacaatttccgcgtcagaatggacaaaatccgcatcagcaagtgcagccgtcattctttccaaatggcccggcgtaatgaaatcatcatcatcgcacagcatgatataatcaccccacgcttttttcacacctgcgttccgcgcttccacatgtccggcattctgttctaaatcaataatctgaatcggcagatcgctgtacagctgcttcgcttgttcgaccgattccccggcatcatttacgatgatcacttcataaggctttatggtctgcctggaaatcgactccagcagctcacacaaagccggaatccgattatacgtgactatgacaattgatatattcatgacccgctccttctgctttttctcatgttctattaaaacataaagcggcggagagatcagggggatttttgatttcggcccattcagaaacaaatccacgtcatccccgccagcaaaaccagaatgatcagaaggtctccccaaacagtgcataccgccttggcattaagtctgcccgcctccatggcattccacagttttgattgataaacaggcaccaacaccatcgcatagcatgtgcacaagcagacaaaagccggcgggacaagcgcacatccatcctcatgccaatcatgaatcagttccggtatactcaccccgctgtcaatgtacaagtataatatacccgccagcggaatgagcgagctgacctgcagctcgaaaagtttcaccttccactcacgcgcaaacgaaacagcccaaatccatcccagcgcataaaacaatagaagaagcaaaatactgaaaacaacaaaagtagcgtcttgcatcccattcagaaccataataaaaagactcacaacgggcaaggcaagaaccaagccgcagacggtaaatacggtaacggctatttgggcgcacgcgccgtacatccacgaacctaatctcatataaacacccctatatagattccctatgtatatagtgaaaaagatcaggcaagtctctgcctgcctgcgtaaaaacctattttgccgcaaaacggaaaacataccgtcacaacggcgcatactgccgcaaaactcggtgtgaccgccgaaggaaacagcccagccggaaccagattgaacaaaaagacaaacataaaacatagattcggcaccattgaagcccataccgtccgctcagcaagctttttgccgccagccccgaactctttgccagcttgatagccgatttggaaccaatacagcacataaccgatcataatcagccatactgacacggaaatccctttccacagcgcgtcaactgcgggatgaatcctccacgcgtgcatcatcgtaatcatcgcccccatcacaaaaagaccgcagttgcagaacagataaaagagcataaaagtccgcgcgggcaccgtcgaagctttttgaaaagcagagataatctcagacggagtccccacttcccgcagaataagctccatcgcttcgctttcggttttgcctttttccagatgaacacaaatggcatgatgaatatggctttcgatttcctttaataattcacggcttccggccttgccttccagcccttttctgatttcgtgcacataaaggtctttatccattctgcccgccccgcttcagcatccggtccatcagagcggagaacagattccattccttcgtccgttcggctagaatgttttttccttcatcggtgatccggtaatattttcggtcgggccctttggtctgcttttcccagtaagaagaaatatagctttggcgttcaagcttatgaagcgatgggtacagcgtgccttccttcatttgcagttcattcccgcttcttttctccatttctttcacaagttcatacccgtacatgggccgttcattcagcagcgtcagcaccagaatgaccgtgcttccctttacaagctccctgttgagcatttattttctcacccttacctagtaatcttatgtaggtattgtacgcacatcccccgcggctgtcaaatcattcctccaagccttccgtattgtgatcgggagaaaatctaactataatgagatataaaacactgatggaggccattgatatgtcaatgcacaaagcacttactattgccggttctgattccagcggcggcgcgggaattcaggccgatttaaaaacatttcaagaaaaaaacgtatacggaatgacggctttgaccgtgatcgtagcgatggacccggagaacagctgggatcatcaagtatttccgattgatgccgatacgattcgcgcacagctggcgacgattgttgacggaatcggcgtagacgccatgaaaacgggaatgctccctaccgtggagatcatcgagcttgcggcgaaaacgattaaagaaaaacagctgaagaatgtcgttattgatcctgtcatggtctgcaaaggagcgaacgaagtgctgtatccggagcatgccgaagcgcttcgcacccaattggcgccgctggcaaccgtcatcacgccaaacctgtttgaagcaagccagctgagcggtatggatgaattaaaaacggtggaagacatgaaagaagcggccaagaaaattcacgaactcggcgcgaaatatgtattgattacaggcggcggcaaattgaaacatgaaaaagcgatcgacgtgctgtatgacggagaaaccgcggaagtattagaaagcgaaatgattgatacaccttacacgcacggagccggatgcacattctccgccgccgtgacggcagaactggccaaaggcgctgaagtgaaggaagccatctatgcggcaaaagaatttatcactgcggcaatcaaagaatccttcccgctgaaccaatacatcggaccgactaaacattcggcgatgcgtcttagcggaaaataaaataaatatcccctcatgatcgagggggattatttcatttttttcgcggatgaccgcaaaaacatctcaatcgattgcacaaacagcgcatattccttcatctgttcatatgtatgcctcagccgatcactccattcattgtgcggctcagccctcttgagcatgcgattcagctgaagcaatacttctttatattcttcccgtttatcttccacttgctctgcagctttgacaagtaaacatttcggcgtcatcttctgatttttcaaaactgagaaaacaactccttttattcctggaatcataggctttcgtttgaagaatagcacagatggcataggtttcacataagaaaaaagaacgattttctacaaaagtgtccaaattgaggcatttatttccgttttcccaaccgaagtgacggttacgtcatcatttcccgggaaaggaaaatatctggcgctgaatacctcttctccatcattcaaaaacaattcaatggaggatgcatccagaaagagctggacggaatgcagctcgctgatggcgcagcttctcttttctttttcttctccgctgaaagcggtgcgctccagcacagccagcccctcttcctgatgaaatataaaccgggccgcgccccgaattgagatttcaaaaccggattcgcaagtaatgtcttccagcagcacttcagcccgggacgcatctttcaccgggaggcttacagacgagcaattcaattgaagacggcgcttttgttcatccgtgcggcgcgatttcatttccgggagcgggcgctgtatgattctgccgttggacagtgacagctgtctcggcatcgttaagcagtgaatccagtgatacgcatgtgtcggatgcttgtcctcatgctgatccggaacgcccatccacgcgaacagaatcctccgtcccttatcatcttccagcgtctgcgccgcataaaaatcaaatcctctgtcaagctccgtaaattcaccgtgcttaaattctggcggctctgtatgcagcctgccgaggaaatagcccgcctggtggctgttatgatattttatcccgtcggcttcaagcccctgcggacatacgagcagcacgtcggttccgtcaagagaaaacaggtcgggacattcccacatatagccgaatgacccgagaccgcccgagtccgcccccgcaatcgaaccgagaaacgtccaatccgtcaggttctctgatgtgaacaatacagcgcttccggtgagcttttctgtctgcgcgccgagcaccatgtaatacgctccgtctttcttccaaaccttcggatcacggaaatgagcggtatagccttttgggagacgcacgacgattccttttttttcaaatacgatcccgtcttcggatacggcgaggcattgatacgtttcccgatttccttctccgtcacggacattgcctgtgtacatcaggcagagccgcccgtctttttcgatggcgcttccggaataacagccgtttttgtcataccactcacccggcgcaagcgcgatttcttcctctttccactcaacgaaatctttcgtcgtcacatgcgcccaaaatttcgcgccgtgccccgtatgaaatggctgccattgaaaaaacaagtgatatacgccgttccattggatgacgccgttcggatcatttaaaagcccgaccggcggcataacatgatagttctggcggtatggatctgacgcggctgtttcttgccgcttctttttcgcttcctcagcctgcaggcgcagctcttgatccggtgtcctcatttgacggcctccttttctttagctcccataatgtaagcggcaataaacgccgagacagaggcgatgcccattccgatcagatagtttataagatttcctaaaccgagcggagccgtgatggcaatcatcggaattccggtcagaccgtaagcattggcggcgacgccggtcaccacgacataggcccctcccagcgctccgccgatcattcccgcgataaacggcttccggtaccttaggttcacaccgaaaataactggttcggttacgccgagaaaagcggaaaatgcggcaggcagagcgatttctttcattttcgcttttttcgtcaggaaaaatacagccagtcccgccgcgccctgagcgacattcgccatcgaccagataggaaggatatagtttctgcccaaatcagcgatgaggccggcctcaatcgcatgaaagctgtgatgcacaccggtgagcacaataagcggataaagaccgccgaaaagaagtccggcaacaatgcccgcgtgatcatacacatatgtcagcgagacggtaatgcccgatccgatcgccctgccaagcggaccgattgcgataaaggtgataaatcctgtgacaatcaccgtgacaaacggggtgaccaataagtcgaatgcgtgaggcaccatttttctcgtgcccttttccactttgctcataatgtaaacggctaacagtacggggatgaccgtcccttgatagccgagcagcgcaatgtcgaagccgaagagttgcataaaatcaggcgatgcatccgcaagcccccacggattcaaaagcgccggatggatcataatccccccgagcacggcaccgagataggcattgccgccaaattccttcgccgcactgaacccgatgaatacgggcaggaagataaacgccgcgcttgaaaacatgtctaaaagcttaaacagcgatgattgttcagacacccagtggaaagccttcatcataccgagcagccccattaaaagtccgcttgccacgatagccggaatgatgggaacgaatatgttagacagtgttttcgcaaatcttgcggccggattcagcttttttttcgccgcgtcctgatgtgtctcacgatcctcccgccccaaatcggcttcttttgaaaaagcgtcatacactttattcacaaggccggtaccgaatataatctgatattgccccgagctgctgaaagccccttttactccttctgtctcttcaatatcggcctggctgatcttctgttcatcttgaatgacgagcctgagccgtgtggcgcaatgtgtcgcgctgatgatatttgatttccctccgatatgtttgataagctgttttgccgtttcttgataattcatgatgtatccccctttctaaaatcaaaaaagacctaaaattcgccaacgaaaaaggtcagcatgatccctttttcatgtacgcaaattttaggtcttgcctgcattaccagtcacaatcccgccgattcagttttttaatgcgctttcattttatttcatgatagcgctttcgtcaatatgttttcaaaaaaaaagtctgtttctcgaaacagacgcgttattccgggtttttttgcagacgctggacatgcagcgtaatatagccggcctcggattccggcagttccaaatcatattcattttttaaaaacgccgccagttcaagcgcacaccgataagcaaacggatactttttttggatgaaataaagcatctcctcgtccatggaatggagtgcttcatttgagtccaaccggctgaccgcataccgtaagtgcgtgacgaggcgctgataggaaatactgtcttcatccaccttctgttcgaaaaaggattcgatcttttcgatcatttctttgatcatggttgtatgcttcatcgccgaatacatgcttttggcatccgccttggcagtgtggatatgaagcgcgatataccccgcctcatcatcaggcaatgatataccgagggtttgtttcacgtgttcaaccgcccagcggccgatttcatattcttttttataaagcgccttaatttcatgaagcaatcggttgtgcacctgaaggccgttttgaatcctttcgatcgcaaaggataaatggtccgccagcgcaatgtggatgtgatcgttcaaaggcgccgcaagctctccctccgcatggctgatgatatcttcagccgcctctatatgctcttcgggaagcgtttctaacacttgtttgaacttttcattttcgtcgtgcacgacaaatattttttcaattttatgtttttgaatcacatcattttttctcttttgaaaagcgattccgggacccattacgatcttttcccgtccgtcttcttttattaacgccgcattgttatttaatactttgtctattctcaagaggttcgctcccgttcatatgtttagtgggattgtaccctctttttcatatgatgtaaaggtgccggacccgcgcgctcccgtttcggcaattctttgcggacaggcatccatcggtttttatccagcctgccgcgggccgatttcgtttcatcggtcaaatccgccgatcggactcggctcacaaacgaaaaagcaccagccgtccgcttcgctttcttatgataagccgcttggtttccgtacacggcggctaatggatatcttccgttacccggcgccatccagttcatcagaaagaccatccacacccgtaaagatactagcaaacgtttcattgcaaatcatccctccgcttctttttgacagacagcttgttcgcaggcctgtttttctctccgctttaacggaaaaggcggccgatccttctccgctaaaaactagcgggtctagcaaccctatgactctatgatagacgcggccgggcgaattgtttgtcacaatatgagtgaaaaaacaaactagttttcagaagttttgttgaaagctgatggaaatgacctgaaaaatggaaaagccgataaaaaaagttatacacaccttatcccttggttaagcacagcttaaacacagggtatatccacatatccacaaactcgatctatattttgtatgggaacactcgttcccaacaatatatatacacaattttattcagttatgcacaggattctgtgtataactccctccttattcacagaccaatttccataaatgagtcatatgtcacaaggattattttgaattttcaagaaatatatactagatttctaatttagataaagaaaaagggggaaacacgattgaaaaaaggaatcatccgttatctgcttccggcttttgtcttatcctttaccttatccacaagttcacaggctgcgccggcttcaaaaccgcaaactcctgatcttgagaaggctgaggtatttggtgacattgatatgaccaccggcaaacaaacgacagtcatcgtcgagctgaaggaaaagtcactggcggaagcaaaggaactcggcaaagcacagacaaaaagcaagctgaaaagcgaacgctcaaaagtgaaaaagaaagcgctcaaaaccattaaacacggaaaaatcaacagggaatatgagcaagtgttttccggcttctccatgaaactcccggcaaatgaaattccgaaactgctgagtgatcaggatgtcaaagcggtttatccgaacgtcacctatcataccgatcaactgaaagataaagacatcaccctatctaaggatgccgtgtctccgcagatggatgacagcgcgccttatataggggcaaatgacgcgtggaagctcggctatacggggaaaggcgtcaaggttgccattattgacaccggtgtcgaatataaacaccctgacttaaagaaaaatttcggacaatataaaggatacgattttgtggataacgattacgatcctgaagaaacgccgtccggtgatccgagaggcgcgtcgactgaccacggaacccatgtcgcgggcacggtagcggcaaacggaacgattaaaggcgtagcgccggatgctacactccttgcctaccgtgtgctcggtccgggcggaagcggaacaacggagaacgtcatcgccggtattgaacgcgccgtacaggacggagcggatgtcatgaacctttctctcggcaattctgtgaataacccagactgggcgacaagcacggcgcttgactgggcgatgtcagaaggcgtcacggccgttacatcaaacggaaacagcgggccgaacaattggaccgtcggctctccgggagcgtccagagaagctatctccgtcggagcgacacagctgccgctgaacgagtacgccgtctccttcggttcctattcctcagcgaaagtaatggggtacaacaaagaagatgacataaaagcactgaataaaaaagaaacagagctcatagaggcgggtatcggcgagcaaaaggattttgaaggcaaagatctgaaaggaaaagtcgcggtcgtcaaacggggcagcatcgcctttgtggataaagcagacaacgccaaaaaagcgggcgcgatcggtatggttgtgtataacaatgccccgggagaaattgaagccaacgtaccgggcatgtccgtgccgacggttaagctttcatcagaagacggcgaaaaactcgtcagccaattaaaagcgggcggcacaaaagcgacattccatttatccgtggctaaatcgctcactgaacaaatggcagacttttcgtcacgcggtccggttatggacacgtggatgattaaacctgacgtctccgctcccggcgtaaacatcgtcagcaccattccgacccatgatccggccgacccgtacggctacggatcgaagcagggaacgagcatggcttccccgcatgtagccggcgcagctgccgtcatcaagcaggccaaaccgaaatggagcccggaacaaataaaagccgctcttatgaacacggcggaaaccttaacggacgcggacggtgacgtatacccgcataatgcgcaaggcgccggaagcatcagaatcatgaaggcgatcaaagcagactcccttgtcgccccgggaagttattcttacggaacgtttatgaaagacaaaggcaatgaaacgaaaaaagaaacctttacgattgaaaaccaatcgtccatcagaaaatcatatcagctcgagtactctttcaacggcacgggcattaccgtttcgggcacagaccgggtcgtgatccccgctcatcaaaccggaaaggtcaatgcgaaagtaaaggtcaatgccaaaaaagtaaaggcaggcacctatgagggaaccgtcacagtgcgtgaaggcggaaaaacagtcgcaaaagtgccgacgctgctgattgtaaaagagccggactatccgcgcgtaacgtcaatcgacgtacaggacggcacaacgcagggaacctaccaaattgaaacctatcttccggctggagccgaagagcttgccttccttgtatatgacagtaatcttgactttgtcggccaagccggcatctacaaaaagcaggataaaggctatcaatatttcgactggaacggcaaagtcaatggtgacaccgcactgccggcaggagaatattatatgctggcctatgccgcgaacaaagggaaatcaagccaggtgctgactgaaaaaccttttatcattgaataaccgaacaaccctgctggagcatcagcagggtttctttctgattaatcggcaaaagcttctcgaagcagacggtatgactgaagtttatcttcaaaatgatgagtaatggttacagccatcacttcttctgttccgtatgctttactgagagccagaatctgttctttcacttgctgcttcgttccgatgatcatccgattccgattatcggcaattcgtctttgttcatacggtgtatacgtattgccgcggacggtttcgtaagacggtacgccgtgaagcggaatcccctgttcacccgcaagcagcgtataatccatgacagccgcgagttcctccgctttctcctccgtatccgcgcacagcacaaacaccgccacggccgtttttggttctttacctaatgcagaaggtttaaatctgcgcttatattgtgctgtcgtgctttctccgccttctccattaataaaatgggcaaacatatagcctgctcccatttctgcgctcagaaacgcgctttctcccgaagaaccgagaagccagacttccggcgccgtcttaataaggggtgatgcggtcagattcggaaaacggtgattgtcatcagctgcatcatgcaaatacatcgccagctcacgaagctgctgcggatattgatcagcattacgcttcccgccgtcattcagcgcccatgatgcgatcggcattccgcccggcgctctccctaatccgagatcgattctgcccggcgtcaacccttcgagcacgcggaaattctccgccactttatatgcgctgtaatgcggaagcatcacaccgcctgatcctacccgaatgtcattcgttttcgccgcaatatggctgatcagcacttcagggcttgagcccgccaaccgctctgaaaaatgatgctctgacacccaaaacctcttatatccgagcttttccgcctcctgcgccaatcttactgtattccgcagtgcactttccgcagaacacccttctgatacaggagattgatccaatatacttaatgaaatcatcactgtcacctcatcaacatcgtaccactgctaagccgttttttctttctgtatgcttatcagcatccctgatgataaacatttatataccttgttccattttgtcgaaatatgttacacgtgaaacataaaaaaacctctcccggtcaggagaggttttttcttaattcttttgaaaacctttatcttttacatattgatttaaataggttctcggtttttgtttcatgaactgcaggatttgatcagaccacgtttcaacccgcttgccgtttgtccgtttatcataataatcggaaatggtttcatcatattccttcatataactgcggaagttttcttcattcgtatcgtacgtgttttcatgatatacggcttgtttcggcaggcgcggcttttgaccggacggatgagcgggatgaccgactaccaagccgaacagcggcagcacatggtcaggtgtaccaagcacttctgtcacctgatcaagttcatttcgaatgcctccgatataacaaatgccgagtcccattgattccgcggcaacacttacgttttgtgcggcaagtgcggcatcaatgatgctgaccataaacatttccgtattctcaagaagctcggtaatgttttctcctttttcctcagcaagttttttatggcggtacaaatcagcgcaaaacacaaacaagtgcccgttattttcgacgtaaggctggtttccggccagtgccgccagcttccgctttttctccttatcggttacgccgatgatggagtaagcctgcacgtaactggacgttgacgccgcctgggcgcttttcactaatgtatctatctcttctgctgtcagaagctcgtcagtaaatgatcggatcgaccgatgattaagtatggtttcgatggtattgttcatatataaagcctccttctctatatatcatatccgaaagagtatcatgccaaaagcgaaatgctctaaacaaaaaaagacagcccgaaaaacgagccgtctcacattaagaattgaacaagtagcttttatatttcgtcagctgcacacttgcgttatatacgatcccgaagctgattaatgtagaaagcaccgagctccccccatagctgacaaacagcagcggaataccggtaaccggcataatgccgatattcatcccgatgttctggaaggtgtgaatcacgataagtgcagtaaatcctacgcaaaaaaacgcaccaaatcggttaaacgcatgcaagcggtcaatcagcaccacaagcctgtaaattaaaaagaaaaacatgacaaccgcaatggcgcagcctaaaaatccaaaactttcacccaaaatcgcaaagataaagtcggtctgtccctcaggtacgtacactttcagattatgaacgccgtttccggtaatgccgcccgatccgatcgccataacggcctgatccacctgccagcttttatcgctctcggcctgagtcgttgccgcactggagtcagacatccacgatgtaatccggttaatttgataatccgcaataccgatcgaattcgccacatggggaaattcaattacaagcactaagaataggccaagcacaagcgcggccgaaccgccgatgatggtgatcagcttccagtttacacctgacataaacaccatcaccataacgataaacagacagatcgcacccgttccggcatcctgcaaaacgatcatcccaattggaataaccgtccatgccgcaattttcaaaagcagattgacatcttcccgaagtgatctttgatctttcgggcccgccttcgatataatggacgcgaccatcatcataattcctattttcgtaaactcagagggctggagggtaaagttgccgatttgaaaccagctcttcgctccgtttttgatcggcgcgatggattccggcgccacacgcaaaaggagcagcgacagcacgccggcaatcaatacatacagactcagtttctcaagctgctctaaatcaaagtacagcaataatccgatgaatcccgcacctataacatagaagacaatctgtttcatccaggcactgcctccatactgcccgaactgtccggccgcataaatcgccgcaacactaattattaaaaacacaccaaatataaaaatcaaatccccctgataatagggattttgctgtttcttatatcgactcattctatcccgccttacattttcatcggaagtcactattgtttattatacatgaacaccgttcaagaaaacatgatgaggttgcttcctttttattttttacggtttggggactacacgacatatgacgtgtcagaaaaggaaatgtttcggtcatgatgaaacttttccgataaaaaaccccttctcgtcagaaaaggggtttcagtctatgtttaacgtcataaacaagctgttcgggtcctctttataatgtgcaaacggatcacaatattgaaaccctgctttttcatacaggcgtctggcggggagaaaagcctccatagaaccggtttctaagctgatccgctgatagccccgccgccttgcttcttcaagcatatggcggaggatccggttggctgcgccttttctgacatgatgcggagccgttttcattgatttgatctcaccgtgccggctgtttagctccattaaggcgccgcagccgagcaggacgccgttttccctcgcactccaaaacgtaacgtcaggctgacgcagccggtccgcattgagcgcgtgtatactttccgggggagaatgcatggtcatgctcttcagatgctcctgcaaaagcgcaatgacgtccggcgctgtgacatcgtcttttgttatgtccacttcaaaaccaccctcgctgtgcatgttttctttgaacatagcaaaggttcacagcctgcgccattcccttgtccggaaatgtgacagggtatttgacctttccggtttcttgtacctatccaaaaatgaggcaatagttgcaatacatttctcgataaagcggtatcaaaaattggaaaacatggtataataattgtaacaaaatgttcaaaaaacgaccacaaaacagacacattttattctctgtatttcattttggaaacgctcccataaaatgaaaggagacatgtaagatggacatgttttttgcttatttactggtcgcaagcgcaacacccctctttatctggctggataacaaaaaagtcgctctttcggccataccgccaattattctcatgtgggttttcttctacttttacgcaaccagcagcctgtcccctctcggccacacactcatgatcatcctgtttgccgtcaacgtcatcgttgcccatatcgccgcctttatcatttacggccttccgcgcctgcgccggagaagaagccaataaaggcacaaaaaaccctcttcgcctgaacgaagagggtttctttttattcctgatgttcggaatgttgcttcgcaccgccaggagggtttccatccatatggtcaccgtgatggtagtgcgccgcaaagatccagatggaaccaaggatgataacaatcgctccgaaaaatccgaagagcgtgtttccgacttgaatcccgccgttttcgctttctgtcatgtgcatgaacatgagaagctgaagaccggcttggataaatgcgaatccgaaaatgatccacagttttgctgatgagcttaaatccgtatataccgcaacccaaagggccagcagggtcagaataatagacaacgcaaaacctacgatatgcttccacggaaagtggctgtgttcagcagatttgtttgccatattatagtccccccaatccgatgagatagacgcctgtaaagatgaagatccaaacaacgtctaagaagtgccagtataaacttgagataaagatttttgaagacgtctgcggcgttaatccgcgtttcttcaattgcagtaagatgccggcaatccagaagataccgatcgttacgtgcgttccgtgcgttcccagaaggacgaagaatccagaccagaaagcacttgtaccgagagatgctccttcatgtacatagtggatgaactcgttaagctcacatccgacgaagcccgcaccgagaagaagcgtaatgatcgtccaaatgacgacgccttttaaacttccgcgacgcatttcatgaacagcgatcccgcaggtgaaactgctgatcagaagcaggaatgtcatgatcatgacaagcttcacttcaaataattcagccggtaagactcctcctgctgttcttctttgaagaacgaagaaggttgcaaatagtgttgagaacaacacaatctctgcccctaaaaagatccaaaacccgagaatattgagtctgccggtttcagattgatattccataggcgcgttagaattgccgtgttctgcatgttccataaatcacgcctcctttattcggaaatctttctttccgtctcttttatttcttcaacaggtatatagtagccattgtcatattcaaatgaacgaagcaccatgcaaagcagaatgccgatcaagccgacaatgcccatccagaaccattcaaatacaagtccgaagccagcaataccgaacgccactgacataataagcggtcttccggagttgtgcggcatatggattttcttgaacttgctttccggatgaatatccgttttgtcttctttcaattgcaggtacgcatcttgagatttcacttctggaagcaccgcaaagttgtaatgcggcggaatcgcagatgaagtcgcccactcaagcgtacgtcccacgccccatgaatctccgctgatctcgcgagtagagtagcggaagctgtagtagatgttgtagcaaaggattaagaatccgacacccatcatgaaggctccgacagttgaaataaagttcaatgcagtccatccgtcattcggtccgtaagtgtaaatacggcgaggcataccttgcagccccaagaagtattgagggaagaaacatacattaaatccgatcataaagatccagaagaaccattttccgattctttcgttcagcttgtggccgaacattttcggataccagaaaataaatcctgcgaaacatgcaaataccgtacccgcgatcagcacatagtggaagtgagatacgaggaagtacgtattatggtattgataatccgctgcagccatcgcaagcataacccctgttaccccgccgacaacgaagttcgggatgaacgcaagcgcccacagcatcggtgttgtaaaactgatccggcctttatacatcgtaaagagccagttaaagattttaaccccggtcggaaccgaaatcgccatcgttgtaatcgagaagaaagagttaacggacgcactgttccccattgtgaagaagtggtgagtccatacaaggaaactcaggacggaaatggcgataattgagccgaccatcgctttgtaaccgaataactgctttcttgcaaacgctgaaataatttcagagaaaataccgaatgccggtaagataacgatatatacttcagggtgtccccaaatccagaacaagttagcccaaagcatcggcataccgccggcttccagcgtgaaaaagtgagcgccgaacaaacggtcaaatgataacagcgccaatgccactgtcaaaacagggaaggcgaatacgataataaccattgtaatcagcgtcgtccatgtgaacatcggcatacgcatcagcgtcatgccttttgtacgcattttcaggatcgtcaccataaagttgatacccgtcatcagcgtaccgataccggcaatctgaagaccgagcaggtagaagttctcaccaggcccgggactcatgtcgttgcttgccagcggcatgtaactcgtccatcctgcgttcggagaacctccgataacgaaagaaatattgaaaagcatcgcacctacgaagaacgtccagaaactcaggttgttcaagtaagggaatgctacgtcgcgcgcaccgatctgcaaaggtacgacaacgttgatcagaccgattaaaaacggcatcgccatgaagataatcatgatcgtaccgtgagtcgtaaagatctcattatagtggtttgagtctaaaaaactgttattaggaagcgctaactgggcgcgcatcatcaagccgtcgaccccgccgcggaacagcatgataacagcagagataatgtacatgattccaagtttcttatggtctacagacgtcagccattcagaccagagccatttccactttttgaagtatgtgagtacaacgatgatagcgatagtggaaagcgcaatggaaacttgtgcgcccagaattaatgggtcacctgttacaaaaaattcatcccatctcaatttcattcgggcttcctcctttcttgttcaatttcaatcttgtttatcgtcggatactttaaattcgtttttctttacatcttcccacgggtctgttttagagtgcggtgatacggctttgtagccaaggcgtttgcgcgcctccatcgcatattcggcatcttggccgtggtcaacgtattttaagtgtgtagaagagaacgttaattttccgacattctccggaagcatcagttcgtcatacttctctttcgtcagctttggagaatcgctttgggcttttttcacccagctgttaaagtctttttgcgtaacagcttttacgttgaatttctggtcggcaaagtgttcgccggtgaagttcgcgttgcggccttcatatgttcccactttgtcagcctgtaagtattgatccatcagcattcccgccatcgcgtatttttgtcccccaagctgaggaatccatagcgatgccattgaatctgctgaagaaattttaaataaaaccggacggtctacaggaatgttcaggtagttaaccgtctcaatatcctgctcagggtagctgaatacccatttccagtctaccgaagtagcataaacaacaagaggctctttatcctttgtcgcttcaggcgctttttctaacgaatatatcgtctgtacggtaggcacagaaagtgcaataacaattaaaattgggatcactgtccagactacttctaagaacgtgttgccgtgcatctcgggcttgtaatttccgctgtctttgcctttgcggtcgcggtatttcactaaaatgattgtaaatagtacgaatacgacgccgacaatgaacagcataaatccgattgacaagagaatcagatctttctgctggtctgctacaggtcctttcggatctaaaacggaaatgtcgctgcatccgcccagtacgaaaacaacagccaacatcgctaataaaagtaacggtttaaatgctctgaacaagaagatcaccatccttcctattgatgtagtgaatctgaaatgtactttctcaaaatcttttctctatctaccttgttatgctatcaaaatctgcccttattagctttatttttttctaaagttcatctttttttcgacctaatgtcacaaaatcgtcaaaaaatgcatgagctttttccacttgcgtaaatcaaacataaaaagttttagatcatttagcatatatagagaaaaaagatagcgagaacgaataataccaaataaaggtttaccataataaaaatcgctggtcaacaaaaagtttcattttgttaaacattctacaaaagaaatattttttcctttgctcacaccttttcacacggtttccattttaacgcaacgcattgtgaaaaaaaagaccggaacgcgccttgatatgttcattataaaaaacgcattcatatgtttaatatggacaaaacgaaggaaacatataggcataaataataaaaaataggaagtgatatttatgggttttatcgtatctctgattgtcgctattattatcggctggatcggaagtttatttgtaaaaggcagtatgcccgggggaatcatcgggtcaatgatcgccggtctgatcggcgcatggatcgggcacggactgctcggcacatgggggcctcaccttgccggctttgccatcattccggcaatcatcggagctgcgatcgtggtattcttattcagcctgatcgccagaagcagaggataaaaaaaagcctcgtcccttatgggatggggcttttttccggtagagcgcccaaatggcggataaaccgccggaaagccgctctgccttcttctgtctgtttaaagacgccggcatgctccagtatccgcgcaaaggcatggccgatttcctctttcagaatctgttccgcgttttctttcgttaccttccgcttatgcagcacactgagcgcccaatctttatgctttgccgcagaagggtctgccgttaagaccgcctccgggtccggtgagcacagcgcttcagccgtgtatttcatttcttgttcaaggcggcccggcagaatcgcaagccccattacctcaatcagtccgatattttcttttttcaggtgatgaacttcctgatggggatgaaaaattcccagcggatgctcatcagaggtgcggttatttctgaggacgagatctaattcgaataaaccgtttctccgccgggcaatcggcgtaattgtattgtgcggtgtttctcctgaacaggcgaggagatcagccgcctcatcggaataaccgcgccatgcccgcaggatggcatccgccgcgccggaaagctcagacgcgcactcactctgcaggcggatgaccgacatcggccacttcacaattcccagcaccgttttcggatagtcaggcagcctgtaccagctttctgtctccgccagcgccatcgggaattcataatggcccccctgaaaatggtcgtggcttaaaatactgccgccgacgatcggcagatcagcattggaaccgagaaaataatgaggatactggctgacgaacgacagcagccggtcaaacgtttttttgctgatcttcatcggttcgtgccggtctttcaaaacgatgcaatgctcccggtaatacacatacggagaaaattgcagaaaccactgctcatcgccgagaatgaccggaatgacacgaaggttttgacgcgccgggtgatccggtctcccctcgtacccgacattttctttacaaagaacacatcccggataatcggattgaggctgctctttggcagcggcaattgctttcggatctttttccggttttgaaaggttgatcgtgatgtccagctttccgtaagccgtctcagccgtccatccgacattccgctgtattctgtccgaacggatataatacacatcctctgaaaatcggtaaaacgcctttgtcgcctgctccggcccgtgcaccgcctttgtttcttcaaaacgacgcacaatctcggacggctgcggggcaaagcagcccatgatcttcgcgctcagcaggtcgcgataggtgtctgtatcggctgcaatccggcccgtttctgccgcccattcataaatcggggccaatatgtccggcaatgatgccgccgattcattttctttctgttctgaagcctccggatgggtaatatgcaaagtttcatataaacggtttcttgtatattcaatatcaagaaatgaaatcagctctttttgcaatccgtactggattaaacgttccacgtgccgctcaattgccatcgtcatccccctttagttctctcgctccggcgccgatatccgccgtgtaaaagtcagcttttctctctgtcttctcctcatagcggcccccgttagctctccgatgagattcactctgccgggcgcaaagaaaaagcgcaggtctcggattccccgaatacatcagcaaacgctttctttattttgcgcttcaaacgcatccccttccaccattacactttccccccgggacgcggaaagaaacggttatgacacgccctcttctttcgcttttctgaagacaatccacttgctggccgcatagttgacgactacaataatgacgttatcggcgattttcgccaatgtttcgttcatatgaaattgactgaccagaagaatcatcatggcgagatcgatggcgagagacagtacccgcacgctgaaaaaggccgttaattctttcatcagactccgcatccccgcggtcttttgctgaaagacataccgtttattcgtaacataagcaaatagaacggacagaatccaagcggcgacagtcgccgccttgtaatccatctcaaatgccgacgtcagaatgtaaaaactgacgatattcacgatggtcgtgaatatccccataatgatatacatcataatttctctgtagcgcatggcagttcctcgctttctgaaagacttttctaaaccttttgtcaaatcaagaagaacgttaccctgattttctggtgctgacaaaaacatagagcgcgtcaaacatgctgcggaaagtaaccggccttcccagcacattggattgcttaatcaccccgtcgatgagcgcgcacatcatgttagcggtatgctcggtatctatatggtcttctattaaatttctcgatttgagccaatttatgtacatggtgctttcttctatccataacttatacaggcggatataagcttcatattcactgacgactttgtaagtaggcatatgaacggcaaaagacacaacattccaggcaggcttgctgtttacaaaccgcatcaacaggctggccgcgctggccgcggcttcacaaagcgtcaacggccgctctgtttgcttttctaattcgtcgagatagccagtgatgatcctttttttaatctgacgcctctctaacaaatgcttcagaaaatcttccttgctttcaaaatgaacgtaaaacgcccctttgctgaaacccgccgctttactgatgtcatcgattgagactgaatcgtaagctctttcaatcaggagatgaaggcctgcgtcaataaaactttcaaatgtttcttctctcttaatttgaaatttgttttttttcattttttaccccagctgtttgatcattcactttatcttacaccgaatcattcttttgcggtattttttatgcaaaaagaatatgctaatcgacgttttgagggtaaatgttaataggtcatatggtttatttttatttgcatactatccagtcagtatttatttgtttattattatatgtaagaattcttgaaggattttggttatttcagtcattttcttagggaataggtaggtgaattcatcttcaatttgggattaccggccaactatgtgtgatatttgttatacattggctgctgtagctgggcaaatcaatttttcaattggaggttcttatgaaaactcatgtaatgaaagatatagatcaagattggcaattgttaattcaagaggctagaatcatgggtttgcacattgacgatgtgaggcgcttcttaaatactgaaaaagcggtgaagaaaaaaacaccaatgaaaaacaccatccgccagcggtaagattacaggcggatccttttactatatgacctgccacagtccgcccgcacccgagttttcaaaggaacacccgcaataagaggggaatcagagaacaaaccgtataccggacaaccattcccgtccgcattccgcaattgaacagccaaacatggtgatatgagatcccccgctgcatatcttgtgtattatgcccatttatgaggtgatacacagatggatacgaatccctattatgatgaaaaacaacagaactactacgaaggcctgaatccttatttattgaacaaaatagacgaaaactggcggacagtgcttgatgtcggctgcggcacgggcaatttaggagcggcgatcgaagaccgcggaataacggtttacggcattgaagcgtatcccgaagccgcaaaaaaggcggaaagcaaattgagccacgtgctttgcggcgacattgaatccgccattcttccgtacgaatcagagcaattcgactgcatgctgttcggagacgttcttgagcatcttgtcgacccgtggacagtgctgaaaaagcttcgtccttatgtaaaaaaagacggcactgtgcttgcatgcataccgaatgtcggccacatctcagtcgtgttggagcttttagccggcaaatggacttacagtgacgccggattaatggatcagacccacctgcgtttttttacccgggaagagactctttcattatttaaagccgccagctatgaggtcaaacgcattgaggcgatccgcgttgatcacccttcttaccacaaagccatcgcatcattgcacgaagtatgcgtacagcttggcataaggcatgactttatgacagaagcatcggcctatcaatatgtgattgaggccgagaggagcatgtaatggattcacattcatttctgtttgtcgtctgtgtgaatgatgagtcgctgtactcccggtgcaagagccatatcatgcagcttaccgtccccccttcatactccgttgatatcatgccgatatacgattcagcaagcatggcctcgtcctacaacaaagcgctgaaacacccctccaaatataaaatttatctgcatcaggatacttttatcattcatcagcatttccttcatgacatgcttcatatctttcaatctcatcaggagctcggccttctcggtgtcgccggctgcaaaaccctgccgccgaacggcatttggtgggaaagcggacagcggatgggaaaagtgattgaataccgggggaatgcttatcacccgctggattttgagcacggtgatgaagacggcctgtttacgcccgctgacgccattgacggcttgttaatggcggctcaatatgacgtggagtggcgggaggatttgtttcgcggctttcatttttacgacacatcacagtcgctcgaatttcaaaaacacggctatcaagtcggcgtcgcctgccagaaagacccttggtgccttcatttttgcggcgactcctttgacgccgcggcatatgaagcggacagacaaacatttgtcaaacactatatggcaaagccctctcgctgatcgagagggcttttttcgggttaacgtttattcagttcccgctcaatgatttgttcaaaggtttcctttcccgccgcgccagggattctctcatcgccgatgataaacgtcggcactgccgtaatgccggcttcctcataagcatggcggagcgcttcccgctgtacgtccttgtacgctcttgtctcaagcgcctctttgaaggcagcgccgtcaagtccggcttcttccgcaagctttgtcagcacgccaacgtcaccgatattttgttcttcctgaaagaacgcctgaaaaacgcgtgtatggtattcgcttcctttcccgtgttcctttgcgaaatgaaagccttcaaatgccaaatccgtgtatggatgcggtgacacgcgggggaacgtgatttcaacgcctaacgactgcgccatcggctcaatggagtttttccacatctgccgcttggcgggatcattcaccggatcaagtttcggcgaggggctcggacgcaattcaaacggcatccattccacctgtacgtccttgtccttgattgcttcttcaaacgccgctttgccgacatagcaaaacggacatacataatcagaatatactttaatctgcagtgtcattgtaagtctcctttccttatcattttaagttgtaacttttatagttacaagtgttttttttaaaaaaaacaccctccatatggaaggtgtcacgattccagcagcctttgggcgatatattctccttttttacagccgccgggacaggcgaataaggaagagccgatcgtttgtgtgtattcattcagcgcatcctttgccgccaaagccttcagcatcgggacaaattggcggtccgggtctttttgaaagcagataaacaacaggcctgcgtcaacatagcccgtcttcggatcaattccgtccgtataggaaaatgcccggcgcagaatctgtctgccggttgattttgccacgctgacatgcgagtcggcgggaatttgattcagcttcacgggatcggtttcctttttttgtccgaaaggcgcgcccgagcttttcacccgcccgaacgtgtcctcttgttccttcaaggatgaacggtcccatatatctaaaaacatcttaattttcctaaacgccatgtacgtgccgcccgtcatccagtccggctctcctgattgaacccaaacgatcgaattcatcaggttttcatccttcgtgctttggttgccggtgccgtctttgaatccgaagaggttgcgcggtgtttctccgttttttccgccgcttaagaaacctttattgagaaagcggacttcacacacacccgatgcctgtttcatcaggttgcgcaccgcgtgaaacgccgtttgttcattatccgcgcagacctgtatgacgatatcaccgccgccttgtttcttatcgagcttgtcgttaggcatcggcggaatatcggcgaggtgcttcggttttttatctttcagtccgaagcggtccttcccgtctttctcgaaaaacccggggccgaagccgaaggtaacggtcaaattcgccggtgccagatcctgcgactccccggtatcctgcggaggcatatatttatttttctgttcgcctgacgggacggcgcctgaagtcagcagctgcgtcaagcttgtccattgtttgaaaagggagatgacatcggctttgtcgcttgacatgacatcaagcgccgcaaaatacacatacgtctgatgcgccgttgtgattcctgcttggtgctttccgtaaaaaggaacgatttgatcacgatcacgtttttcatcattcttctttgaagcggtggccgccggtttgaagagcggcgcgagtcctccgaggccgctcgctccgacagcgacggctgcgcccgcgacggcgccccacttcaggacatcccgtctgtggatctgtttttccttgttatgttcatcgctcatgctgtgtcttaactccttttaaagcacatcggcaatcttcgacatggtttcagaaagggccgtcagcttcgtgcttatctctctgatttgatctgtacttaatgtatcacaagacgtatacattgatcgcacgttttgtatttcgacatcaaaacttcaaattcgctgaattccgcattaagtttttccgtgacctcgaaatggtctctcacttcgcgctattcactgttttatagagggcttttgagcctgcgctgattggttcaggcgtcactttgagagaagcgatagagccgtcaaacgcttcggtcgatattgcaagcttgattgctctgttcttgacatacggcttctattctcccagtccgtcacgcctttttgcgcacacagaaaaagggccgccctatcgggacagccctgctttggagcgccgaatttcctctgaaaacttccgcgccgccgcttttggatcttcggcttggctgatggcactgatcatgctgacgccgtctgcacccgcttcaatgacgggcgccgcgttgtcagccgtaatgccgccgattcctacaatcggaatggtgatgccctgacgccgtacctcttcaatcaatgtaactccctgcacggcttcagcatctttttttgtttcggtcggatagaccgggcccattccgacgtaatcggctccggcttcttccgcccgcttcacctcggagacgttatgtgctgacacaccgagaatcatatcgccgattgccgctctcgtttcttcggcgtctgcgtcatcctgtccgatatgcactccgtccgcctcaaggcgcaaggccaattcggcatcatcattaatgatgaaaggaatcccggcctgcctgcagacatcctgcacccgcttcgcgaacaggacacgttcatcccctgttaaagaaccgctccccttttcccgaaattgaaaaagcgtagcgccgccctcaattgcttttttcaccacggaaaccgggtctgcgcttgtattgtttgatcccataataaaataaaccgataacatattcttcatcatttcccgagaaatacgcgtcatttttctatcaccctttcaattgcggcaagctcagccgcttcttgttctgagatgcttgccagcttgtttaaaagctcaatctggaagctgcccggccccttatgggaggtgtccaaagcggcaagctgagcggcgcttccgtatacagaaacggctgaaacggccgcttgcagaacgtcctgccccgctgcgcagaaggctccgattacagacgtcagcaggcatcccgcccccgtcaccttcgtcagcagtttatcaccgttttgtacggcgtatgtgtcggtgccgtcggagatgacgtcggtttttccggtaatcgcaatgaccgtcttcagcccgcttgcagccgtcttagcgagctgaaccacatctcctccggcttcccccgcatccacgccttttatcttccaatcaggggcgccggcaatattggcaatttccgcggcatttccgcgaataacggacaagcggacctcctgtatgatcttgcgggctgatgccgtccgaaacggcgtggcgccggcgcctaccggatcaaaaatgaccggaacaccgttttcattggccgattttccggctgcgatcatagcttcaaccgatgccgagctgagggtgcctatgttcaggacgagcgctccggcgattttcgccatgtcggcggcctcctcaattgcataagccataacgggcgatgcgccgagcgcgagcagtccgttagcggtgaagttcgtgacgacattattggtgatactgtgaacgagcgggttttgatcccgcactttactcaagtgttgagctgcggtttgtgcgtccatgcttaatcatccttttttctctttttcggattccataaatacgatttcgtatgctccagccaggctctggcggcaaaggacatatagcggtccttccgccaaatgatggctaaatgccacggaatgaccggatgaacgagcggaatggttctgactttgtcaggatcaagaccgcgacagattctttccggcagcaggccgataccgagattggcggataccatttcgctgataaagtcccactgtgatgtttcataaatgacatgcggcctgaatccggctttcacgcattccgtcataattcgattatgaaggacaaaatcctccctgaaaaatatgaacggctcttctttcaattcatgaagactgcattctttctcgtcagcgagccgatgtgacggatggacgacaagcataagggtttccttgacgattgtgaaggtatgaaaaatctcttcattcgcgggaagcacgacgaccccgatatcaagcgagccgtcctccaccccttgctgcactttaatagagccgtcctcaacaagctgaaacgtcacatcggggtatgtgacgcggaagtcaccgagcactctcgggaaaaagccggacccgatcatcggcggaagaccgatgcggacgtgccctttcttcacttccataatatcgttcagctctgacgtcaggttttggaatgactttgtgatttcctgcgcctgcacatacatgctctgtccggcgtcagtcagttcaacttgccggccattgcggtaaaacagtttaatgccgagctccgtctccaggtttttaatcatttttgagattgtcggctgtgaaacatacagagactgtgaagccttcgtaaagcttttcaaacgggccacttccaagaaatacgttaagtgccggatatccattacatttcatcctttctatagacaaaaggaatacacattattctttatatgtattttacctatagcaaaaccttctgtacaatataaatataagggaggcatcattatgaaaaaattgctgcttaccgttattcaaatcgctctgctgtttatatttgcgcgtctgatcaattggatcacggcggctcttcatataaatattcccggcagtataatcgggattgtgattcttttcacattattgcatttcaagattatcaaacttgaatggattgagcttggcgcagcatggctcctcggtgagctgctgctgtttttcatcccgtctgccgtcggagtgattgaatacggagatattatgtctaaattcggcgtaagcattttacttgtcgtcgtcatcagcacatttgtcgtgatggtttcaacaggtacgcttacacagctgatagcaaaaagaaaggagaaaaaacaaacgtgttcatcggaatcataagtttattcttaactgtcttagtatatttgggcgcgaaaaaactctacattcgttttccgcgggtgtatacgtcgccgcttctgattacgcccgctgttttggtcgtactgctgcttcttgtcaatgtcccgtatcagacatacaatctcggcggcggactgctgaccgatatgcttcagccggcaacagtggcgttcgccatcccgctttataaatatttcccgattttaaagaaatacgccgtggaaattattttgaacgtagcggtcggttcatgtatcgccattctgtcaacagcctttatcgcaaaatggttcaatctcggcagcagcttagtcgacagtctcgtgccgcgatccgtgacgacgccgattgccatgaacgtttcagaaatgatcggcgggatgccggccgttacagcggttttcgtcattttaacggctttattgggaacgatcatcgggccgatggtcatccgctatttccgcattgataacgaaattgcccggggcgtgctgctcggaactagcgcgcacggagcgggaacatctaaagcatttgagctcagctccgtatcaggaacgatctcaagcgtgtccatgattctcgccgcgattatgacactgtgcgcggccccgattttgctttcgtttatgtcataaaagactgctccttacagagcggtctttttttagttgccatgaagaattgatttgtctgtccttcataaaaagacgaaaacacgatatgataagacatgaagtgaaaagactgaagaacggatgtgtcatatgaacggccagcagcgaagcagcatcagaaaaggacttgaagtcgatatcgtcctgaaagccgatcagcgttcaggaaagctgacaagaggaatcgtgaaggatattttgacgaactcaagcttccacccgcgcggcattaaggtccgccttgaagacgggcgaatcggccgggtgcagcacattattgaatagaaaaaagccggagcttcacgcccggcttttttttctttaatttcagcaatgaaatcctcatatgttctccctttatatacaaaaaatttttaaccaactattgactcttacgttgcgtaatactttagagtagccattaaggaggcggcaaacgtaatgggtatgaaagtaaaagaagtagctgacctgattggagtaagcatacgcactctccatcattacgatcaaattggattattgactcctcaggaaacgaccgattccggttatcggctttattctgaagagaatcttgaacagctgcagcagatactatttttcaaggagctcgatttctccttaaaagagattaaagaaatcattactaatccttcatttaaccgaagggaagcattcattttacaaaagaaaatgttgattgagaaacggaatagagtcaataagatgattgaaaccatcgataaatcaatcaaacatatgatgggagagatttgcatgacgaacaaagagcggtttgagggaattaactttaatgataatctttatgagcaagaagcccgcaaacggtggggtgatcaacctgtcgataaggtaaatattagattgaaaaacatgactgatggtgagcaaaaagatttatctgataagtggactgcaatgttcaataaatttgcactccttattaaccaatctcccgagtccccagacgtacaaacagctatcaaagagtggtttgattttctcaatgaaaattttggtgaatattcttttgatgccttttacggattaggtcaactctatattgaagatgaacgcttcactaagaacatcgaccggtatggtgaagggttggcgaagctcatgagtgatgccattacaatttatatagatactcaaaaaagggtggtgcccattaaaatcattatcgaggatacaattgggcggagggattagtgaggccactttacttggcacagatgagatactaaataatagcgggttttttctttaaacagtaagatatgaagattatttatcccgtattaaagcgatggaagagggttttcttttccccctctttccacgctataaatgatcatcctattttttccgcaagaaaacaaccttcaaatagttcccttctttaaacgccggaatcgttttgaaatcttccggaagcgtgtattcttccaaaatgtcgtaacgctcatttgtttctttaaaggcggtctctataaaacctttaaatttcttcatattgaaggcgctgctgtttgtcgaagcgacgatgatgccgttttttgcggtgatggcgatcgtttccttcagcaggtttttataatctttcgccgcgctgaacgtccgtttttttgtgcgggcgaaagaaggcggatcaaggatgatgaggtcaaacgccagcccttttttctccgcatagccgaagtatttgaaaacatccatgaccttaatgtcatgcgcctcataatcaattccgttggcgctgaactgttcaatcgtttttgcgagactgcggttggcgacatcgacgcttgtcgttttctcagctccgccaagcgccgccgcaacggaaaatgcccccgtataagagaacgtattcagcacccgtctgccgtttgcatacttgtcccgaatcgctttgcgtacatgacgctggtctaagaaaatgcccgtcatcgccccatcgtttaaatccgccgcgtaccgtatgccgttttcttgaacaatgaccggaaaatctcctctttcgcctttgacaaaatcgtcgtcttccacgtattgcccggcagtatcgaatcgtttcttttcatagatcgctttataagaaagctccagtccgtcaatcgcctcaatcatgctgtccttataagcgtaaatgcctttactgtaccattgaatcagcagataaccgtcataaaagtcaatcgtgacgccgccgatgccgtcgccctcaccgttgaaaagccggaacgccgtcgtatcgggcgcgttaaacagatgggctcttgcttcagccgcttttttcagcttgtccagaaagaaacgtccgtcgatccgttcatctctcgcgcgggacagcacccagccgactcctttattctgcaaaccgtaatagccttttccgataaactcacccttctcggatgtcacatcaaaaagatcgccctctgttaaatgagccgagcttccggacagagcgtctttttcaatcagggggaatccttttttcagctttccggcaaatgtatctttcactgtaagtagcttcattgtgcattcctctttcgttttgctttctcttatcgtaccataaaacatgatcaacaccgcattgtcccgaaaaattcaaaacagggggaaaaccatgacagccaaaagaatcgaccatacaggcattatggtcaaagatattgaaacatccatcgccttttaccaagacgttctcggtatgcagttaaaggatcgtatcactcatacgaacggcattattgaacttgcctttctcggctttcaagaagggccggagacagaaattgagctgatccagggctacagcagcgagcttcccgcagaaggaaaagtgcaccatgtcgctttattgactgaagatatcgcagcggagttcacgcatgcgaagcgtcagggcgccgtattcattgatgaagaaatcacgacacttccgaacgggtaccgctacttttacattgaaggacctgacggcgaatggatcgaatttttccagcgttaaaaaaacgggcgaaagcgcccgtttttttttatgtttcttctgtgacgttttgttccgccgcccgttcctctctccatttttgaagatcccaaattcggaaaaacggataataaatgataaatgtaatcaggagattgatcagctgcatgaccgaaccggagatttttccgcccgtcgccaaataaccggaaatcagcggcggcatcgtccacggcacggcgattcccgccggttttgccaccatccccgtgctcatcccgatgtacgtcgccgtaatggtcaagagcggcgcaacaataaaaggcacgattaacagcggattcatgacgagcggcatcccgaaaataatcggttcgttaatgttaaaaatcgcgggcccgatgccgagacggccgagctgtttcatctgtttgcttctggagcgcacaagcatggtcagcacaagggcaagcgtcgctccgcttccgccgacattaatccatatttgaaagaactgtgtcgtaaaaatgctcggcagcgcttctcccgcctgaaaagccaaacggttggcgtccatcgccccgtaccagatcggcgacatgacgccgccgattatggacgcgccgtgtatgccgcacgaccaaagcagcatttgcacgaattcggcgataagacttccgccgagactcccgcccaaaatagacagcggggtgcccagcagatcgcctacgacattgtggagacttttaaaaggagttatttcaataaacagacgggccagccatacaagcgtaataataatgaaaccggggatgagcgcaacgaacgatttgctgaccgcaggcggcactccgtcaggcatcttaatgacgatatttctttgtataataaaccggtacacttccgtagacagcattgcaatgatcatcgcgacaaacagacctttgcttccgagcagcgaaatcggtatgccgcctcccaccataatctctgttgacgagccgtcagggataaacggaatctgatacggcgtcgccaataaaaaggcggcaagggcaatggctcccgacgacagggcatccacctcatagctttccgcaagccggtaagcaatcccaaaggcggcgacaagcgccataatgtcaaaggacgcattcacgggatacccgagcttttcaacccaattttcaccgaaaagaccagccataaaatcggcataaccgggaatcggaagactcgtcagaatcagaaaaaccgatccgatgatgataagcggcatagtcaaaataatgccgtcccgcaaagctcttaagtgcctttggccggcgacttttccggcgacaggcatgattttttcttccatgacccgattgaacgtactcatttatcaaaaaccccctttttgagttcattgcgcagatgtcttaaagcattttctccatcatattttggaaacgcttacatttgcatacagaaattttccttacccctcaggaaaaaaagaattccgcactgccgatatataaagaaaaagggggaatcgcaatgtatcacaccctgaaaccgataatggccgcggccttgtgcatcagcctgttctccgccgcggcgcccgcgcacgccgagacgcatgaccgggacgttatcgtggtgtacaaaaatcaaaacggcaaggaatccgccatagacagcggagcggatgtggaacagacctatcagcatctcccggcagtcgccgtgtcagccgattcgcaaacagtgaaagacctgaaacaggaccctgacatcttatatgtagaagagaatgtatcctttcaggcagcaggcggttctgatatccgcccgttatcagctgcccaaagcagcagttacgtgctgccgcaatgggatatcgaaccgactcaggttaagcaggcgtggaaagaaggcttgacgggaaaaaaggtgaaagtggctgtcattgacagcggcatttaccctcatgatgatctctccattgccggaggctattccgcagtcagctatactccctcatacaaagatgacaacggacacgggacgcatgtcgccggaatcattgcggccaaacatgacggatacggcatcgacggcatcgcgccggatgtccggttatatgcggttaaagcattagacagaaaaggagcgggagatctcaaaagccttcttaaagcgatcgactggtcgatcgccaataaaatggacatcatcaatatgagcctcgggacaaacgcagacagcaaaagtcttcacgacgccgttgacaaagcttacaaaaaaggaatcgtgatcgttgccgccgcaggaaacgacggcaataaaaaacccgtcaattatccgggcgcctacagcagcgtaacggcagtctcagcgtcaactgaaaaaaacgggctcgcagctttttccacgaccggaaaacaaattgagtttgccgcacccggcactaatattacgagcacgtatctgaatcaaatgtacgccacagctgacggcacatctcaagccgcgccgcacgtcaccggcatgttcgcgctgctcaggcagaaatatccggaggaaacaaatacacagctccggcagcagatgcagcagaacgtcaaagatctgggcgctcccggacgtgacagccgattcggctacggactggcgcaatatcacacaaaacaaaagagctttgccgaacgggccgtaataaaagcggaaaagacgaaaaagcaggcagatatcgatgaagcaaaaacggcagtcagcaaactgtccaagtcaaaaggaaaaaccgctctcgaggcgcggatcaataaagttcagacggcaagaaatgtgacggacgcaagagacaaagtccggactgccgaaaaacaaaagaaaaaaaccgccgtcaatgccgcacaaagcgccatccgcaaattaccggccggttcagagaaaaaagggctgcaaaagcggctgaacgctgtcaactcaagccttttgagaactgctgaggccagcgtcaagcaggcggaaaaaaagacttctgaggccaacaccgcaaaagcccaaaaagcagtcagcgaaatccagccgggaaaagaaaaaaccgttctggaaaaacggcttggctggataaaagataaactcaaccggcagcaggcaagggacaaagtaaaaacggcggaaaaaaccaagacgaaaaaagcaaaatcagcggcgcaaacggcagtcagccgattgaagccgtctgccgaaaagaccagcctgcaaaaacgcgtgcgtgcgattcgggtgaaataataaaaaaaacgcttgtgagccggtcaacggcttcacaagcgttttcatcacacctgcctattggttcatggccgggcggtcaatcgtgttccatttcgtaaaggacatatatcggaaataatgatcacgatacgggtgcgaggtgcctgtattccaaggcttgtccccgccgcagaaatggacgatggccggttcggcacgtgtttctctgtaacgtatacggtcgatcagttcaggaggcgttttctcattcatgataatatgcgtctgcgcgttccagcgcggatgcagttcatgccattgatcatataagatcgcgttaagcgcgtcctgatcatgaaacacgagaaaatcctccgagctgttatcattgataaaatcaatcacttttttggaaatattctgttttctccaaggttcgaaatctataatcataataccggaattaaaatacttggcagtgtcgctgatattcatttttttcagtctttcatgctgtccggcatcttctaccgccgcaactattgccggggaaatatccaagtcccataaaaccgaaatatcttccatcacaattgcatcgcaatcgatgtaaatcatccgctttacggactcatccttaattaaatcagggatagaaatgcggtaataagccgcttttgtaatatggctgctttcgactgcatgcttgtattgatcagcgtctacttctaaaaattcaagcggcgtcccgaatgacatcgcagtctgttcaagcttgtccttgttttcggcagtaattccgccgtcgatcacatataatttggcattccttgttttatccatattcatcaataaagaagcgaacatcccacccaaatgacgagcataattatcatcggcacatgatacgatatgcattgtttcattctttcccactgatattcatctccctttttgttgtacaaatgtctttccctttttttaaaaagtaaacctcaatcttacacattttttctgcgggaatgtgctgtttgcgatttgatatctttcgcattctctgttaaaattcatttcatagctaatgattctgacaataataaggagcatgacgccattgacgattcgcaacgatgccggatcagacaataagaagccgaacaggcctttttccgatctatccggccgaaacaaagaggcggcctatattgcagctgcactctatcggtccgcccagcagctccgtgtaaaaatggagaaagaggtgctgtcggcacacaaattatcatggacggcgttttccatcctgtatgacctttgtgaatgggaaacgcttgatacaagaaggatagccgctctatccggaattacctcggcgacggcgagcaatgtcctgaacactttggaaaagaagggcttatgcagcagacaaacgaacaaaagagaccgcaggcttgtattcgtcagtattaccgatgagggcagaaaggttattgaagatctgtaccccgactttcatcagggggaaattgaactgacggcctgtctggataaacaggaacaaaaaacgctgtccgccctgctgcaaaaaatcgctgacaatttcataacatagcagctatgacgggaatcagtaacggattgtctccctgtttcagagagccggcggatggtgcaagccggcacaaagacaaacgtgaattacctccctgagctttctttgtgaacttcagtagcaaagaacgggaaaccgttattcgaatgagcggaagacgtcgtttcgtcttcaatcagggtggtaccgcgtgcatacagccacgtccctttttgggatgcggcttttttgtttggctaaaaaaaggaggatgtaaaagatggaatcaatcactttaacgaatgatcaggaaaaagaagtgcaaaggcagctggatttgtacatgaccggcgccgcggacgtcataccgcctgaagaattgagaaataaaatcgccaaatcagtggcatccggcaagccgctgaacattaaactcggccttgatccgtccgcacccgacgtccacttgggccataccgtcgtgttaaacaaactgcgccaatttcaagaaaacggccatatcatacagcttgttatcggggactttaccggaaaaatcggtgatccgacggggaagtcgcaagccagaaaacagctgactgatgaagaagtccaacacaatgccaaaacctattttgaacagtttggcaaggtgctggatcaagacaaagttgaacttcactgcaactcaaaatggctgaagacattgaatctggaagatgtgattgaattagcggggaaaattactgtcgcccgcctgatggagcgcgacgactttgaggagcgcatcgccatgcaaaaaccgatctcacttcacgaattcttttacccgctgatgcagggttacgattctgtcgttctcgaaagcgatatcgaactcggcggtacggaccagcattttaacgtgctgatgggccgccatttccaagaacgctacaaaaaagaaaagcaggtcgtcatcctcatgccgcttttggaaggtcttgacggcgttgaaaaaatgtctaaatcaaaaaacaactatatcggcattgacgagcatccgaacgacatgtacggcaaaacgatgtcattgccggacagcctgatgaaaacatatatccatttagcgacagacttagagcctgcggagaaaaaacagatggagaaggatttggaatcaggaaagcttcatccgagagatgccaaaatgatcttagcgggtacaatcgtcagaatgtaccacggcacgaaagcggcggatgcggcagagcggcatttcaaacgtgtcttccagcaaaacagcctgcctgaagatatgaaaaccgtcatatgggacggagaaaagaccgtgccccttattgagctgcttgtcacgcttggactcttttcttcaaaaagcgaagcacgccgtatgattcaaaacggcggaatcaaagtgaacggggagaaaacggatgcccttcataccgtcattaccgcagaagacggcatgacgattcaggtgggcaggcgaaaatttgtacagctgcgcataaacggataaacaaccagccggactgcgtataatagcggtccggctggttgtgacgggtcaatcgtttaatcgacttctttcttaatcccaagcatcttttcgtctaaataatgggcgatgtccgccgcttccttcagctcgtcggtcagatgctttgggacttcgttatttaatttgtaataaattttgtgttcaaggctcgcccaaaaatccatggcgatggtgcggatttgaatttccgccttcacatattccacacgattcgtcaaataaacgggaatttcaataatcaaatgcaggctgcggtagccgttcggcttcggatgtttgatataatccttcacctttacgatcttcaggtccttatgctgcttcagaacctcagcgacattataaatatcggaaataaaggaacagataatcctgacacccgcgatatcatgaatatgctctttcatttcctgcgtcgtcacatcgcagcctttgcgcatcagtttattgacgatgctttcaaaacttttcacgcgtgattttgtatgctcgatcgggttatgcccgtgaatcagattatattcctggctgatgatagaaaacttcgtatccagctcatctaaagcgaatttataaactaataattcatttttccaatcttccatgaccgtttttaaatcatccatatgggctgttgacaagtccatttttttcatctccttgctttgctgtccatatatgagacgggtcagtccgcggtcaggttctttacaatatcgtgaagattatgtcataaaaaaaagcaaatgccggttatagcatttgccctttcatttgatcagcggaaataactgatcaggagtccgattgaaagcaggaatccgaagaatgtattggtttgcgccgttgatttcatcgcaataatcatgttcatcggcatttcgtttttcacaaagcctttcacggcctgaacgggtttcggcacgctcaaaaagaccaggaacagccacgggcttgtgtaacccatgatgacaagaccgacgatccagatgtaagcgatggcaaaagatgccgccagtatcataacggcccctctatgccccatcaaaatggccagcgttttacgtccgccttttttatcttcctcaatatcacgaatattgttggacaggttaatcgctccgaccaggatggcgatcgggatggaaatcaaaatgctctgttcattaattctgcctgtctgaatgaaaaaagaaataaggacaaatacagagcccatgcaaatgccggagaacagttccccgaacggtgtatacgcaatcggcagcgggccgcccgtatacagatagccgatcagcatgccggcaaggccgatagccgcaagccaccagctgctgctcatgcagatataaacaccgagcacgagagcaatcgcataagagccgagcgccagctgcagaattgttttcggcttcatgccgtggcggacgatcgctccgccgataccgacggaatcctccgtatctaaaccgcgtttaaaatcgtaatattcattgaataagttcgtggcgatctggatccaaaggcaggaaaacagcatggccaaaaacagcaggaaatcaacctttacgtaaaacatcgccaatacggtgccgagaagtacgggcacaaacgatgccgtcaatgtatgagggcgggttagctgccacaaaatgcggcccatgctttctttctcgggcgtcttttggctgccccccatattgttttgattcattttcctcttcctttctattaaaaggctttcacagtcagccgataacagtagtgttgaattggggttttcacgttttctgctaccttatctatcataataatttcttcctcatttcacaagatgcggcgctttatcagctatcctgccggaaacggcttttcgcccttctcccttggggttcggcacaagcctgcttaagaaaaagccgccaaaatttttttacctcgtttatatttacgataagttaaaaatcccgcctgaacagcgcctttttagtatgatcatttgccaatttatacatgcgtgttttccatccttttgtttctcattcatttttaaggaaattttaagcttaggatattagacatattttgaaactttttgttaatctaatcgtcatatactggtgtaattattgaatacgcggggaaggaattttgaatatgatgcaaaaattaaaacgtgcttatgaaaatacattgatcaaatggacgtttcatacgggcttttattttctgatattagtattgctcttttggatgtatggatttcatacagcgaataccggcacttatatttacaacgatttctaatcggggaggataactatgaaactacttgatgctataaaaacatacgcagacgccaagccgcaggccgaagcgtttcgttccttagatcattccctcacttacggggaattatgggatttgtcggagcgggttgcgtccggcattcaaaaacatacagctgacggttcgaaagcgcctgtcctggtttacggacatatggagccgaatatgattgtttctttcttgggaagcgtcaaagcgggccgcccttacatccctgtcgatgtttccattccggcggagcggatcgtcaaaatcattgaaagctcaggcgcagagctgcttatcagcgtatcgggcgatgcagtcgatacgggaagcaatctgattaaaaccgttacgcccgaagagcttgcagctgacggagatgcagacctcagccgtgagaactgggtaaaagagctggatacgttttacattatttacacgtccggcagcacgggaaatccgaagggcgtgcagatatcggctgataacctgcaaagcttcactgactggatctgcagggattttcctgtgggcggggtaagacattcttaaaccaagctccgttttcttttgatttatctgtcatggacattttcccgtcgcttcaaacgggaggtacgctgcactgcgtaacgaaagacaaaatcaataaaccgaaagtactatttgaagagctggagaaatccaaactgaacgtctggacatcgacgccgtctttcgtccaaatgtgtctgatggaccccggctttacgcaggagctcctgcctgaggcagaagtatttatgttttgcggagaagcgcttccggctgccgtggcacaggaactgttaaaccgttttccgaaggcccgcgtattcaatacatacggcccgactgaaacaacggttgccgtcacctccgttgaaattacgcagcagattatcgatgaaaatgaatctctgcccgtcggttttgcaaaacccgatatgaatatcttcatcatggatgaaaacgggaataagcttccggacggagaaaaaggggaaatcatcatcgccgggccgagcgtgagcaaaggctatctcggtgaaccgtctctgacggaaaaagcgtttttctcaattgacggccagtgggcatatcacacgggtgatgccggttatgttcaggatggtcagattttctgccaaggacgccttgatttccagattaagcttcacggctaccgcatggagctggaggaaatcgaagtacatgtaaggcagtctcaatatgtgcagacggcggttgtcatcccgtatcagcctaacggaccagtcgaatatttaattgccgccatcgtgcctgaaaaacatgattttgaaaaagaattccagctgacaagcgccattaaaaaagaactggccgcttcgcttccggcctacatgattccgagaaaattcatttatcaggatcacattcaaatgactgcgaacggaaaaatcgaccgtaaacgcattggcgaagaggttcttgtatgacgccttacagctcgtttttcttctttatcttacttggaatccttcttttgccgacgattattttagggctgaacggcaagagattccaaggatacaacatgtttatatccatcatcgtattggctttgattttcgcgcatgatctgcacggcgtgatcgcactatgtatctttacgctgtggcaggtgcttttaatcaggggttatctcgcttacagactgaaagccaacagcggctttgtcttcagtatggccgtgatcgcgtccattttacccctgtttttatctaaattatggccgtttttcttcccgccggcgcctcatcatccggttcataacctgatcagtttcttaggaatttcttatttgacatttaaaggcgtccagctgatcatggaaacgagagacggactgattaaagaaaaaatgccgcttcaccgccttttgtactttattatgtttttcccgaccatttcttccggtccgatcgacagataccgcagatttgccaaggacgaacagaaagtatggacaaagggagaatacgctgatttactgtataccggcattcataaaatttttatcggtttcttgtacaaattcattatcggatatgcgattaacacgtatttcattatgaatctgcctcatatcacccacagtaaactgtggggtaatgtgctgtacatgtacggatacagcttgtacctgttttttgattttgcgggttacacgatgtttgccgtcggtgtaagctatatcatgggtatcaaatctccggaaaactttaataagccgtttatcagcaaaaacattaaagacttctggaaccgctggcacatgtccttatccttctggttcagagactacgtatttatgcgctttgtattctggatgacaaagaaaaaatggataaagaaccggatggccgtctcgaacatcgggtatttcctgctgttcatgctgatgggcgtctggcacggactcgccctgcaatatattatatacggcctttaccacgccgtattaatgaccgggtataacttttttgagaaatggaataagaaatacaagtggctgcccgccaatcgttttacggcctttttagccatcgtcatcacattccatttcgtatgtttcggattttatattttctcaggaaaaccatttcatcactaaaggagattgaaaacacatggaatttaaacaggaagtattagacgtattagctgaagtttgtcaggaggacgctgtgaaagaaaatcctgatattgaaatctttgaagaaggactgcttgattctttcggaactgtagaactgcttgtcgccatcgaaaaccgcttcggcattacagtgccgatcactgaatttgaccgtgacgagtggaatacgccaaacaacattgtaaacaaactgactgagttgaagtaaatgaaaaagcgtttctttggaccaattattttagcgtttgtcctgtttgtcggagctatcgcagttccggcttcatggcttacgcgcttcattcctgaaaaacgtgtcgaagagtcggcagcggccttaaatccgaatatgttccagggcctctatctgcaaaacaaaatgttcgaagactcgaagtatatgccgattttcggttcttccgagctttcaagactggatgagtttcacccgtccaactatttccaagtgaacaaccaaggctttacgccttatcttgtcggaaaaggcggggaccaatccttgatacacgccgtgaactttgcggcgcattatcagcagctgaagggcaaaaagctggtattcattgtttctccgcaatggtttatcaaaaaaggttctgatgaacagcactttgcgccgaatttttcatcacttcaggcattggatttagcatttaataaccagattgatcccgcggtcaaaaagaacatgatgaagcgcatgctccgttttaaagttgttcagcatgatgccgtcctttctgaattatacaagggaatggtcaacggacaatcatggaaagtgaaagcggtcatgccggctgccaaagcttattattctctgcttgagaaaaaagatctttattattcaatgggagaaaccaagggccctgaacggacgatctctgaaaacctgaaagggaaatcgtggtcagagttaaaaacagccgccgctcaattaggagaacggagctccaagtccaatcctttctatatcgatgacgcttcttataaaaagattaagaagaaagtaaagagagtgaaaggaatcaacaaaggaagaacgtacgccaaatcagtcgaatatcacgactttgaggatatgctggacattctgaaagatgccggcgctgaaccgatgttcgtagttattccggtcaacggaaaatggtatgactacaccggcttcccgaaaaaaggccggactgattactacaaaaaagtcactaagcaaattaaagcgaagggctttcaggttgccgacttatccgggcacgaatatgatccgtactttatgaaagacaccatccatatcgcctggaagggctgggtgtacgtcgataaagcaatggagcagttttacaaaaccggcaaggtgacggttcactgagcacgatgattacagaatatgtaaaaacgaacacgcagggggcattctctcccctgctttttatgtgatttgattttttcacaaatttgaggaaaactattgcgaatatttgttgaaggtatacaatagaatataaattattttcaaataagtttgacaataacaccaatagggagacagaacattatgaaacaagacattcgtgttgaattgacttcagccaaaaaaccgaaaccggacccccataaccttgcgttcggcagaattttcaccgaccatatgtttgttatggattacgacgccgatcaaggatggtatgatccgagaattatcccttatcagtccatctcaatggatcctgcggccatggtttatcattacggccaaaccgtttttgaagggcttaaagcgtatgtaacgaaggatcaggaagtgcttctgttcagaccggagaaaaatatggagcgcctgaaccagtcaaatgaccgcctttgcatcccgctcattgatgaagagcttgttcttgaaggcctgaaacagctcgtagccatcgaccaagactggattccgaaagcggaaggcacttccctttatatccgtccgtttattattgcgaccgagcctttcctcggtgtagcggcatcccatacgtacaagctgtttatcatcctttccccggtcggctcttattacaaagaaggcattaaaccggtaaaaatcgccgtggaaaacgaattcgtgcgcgccgtcaaaggcggcaccggaaacgcgaaaaccgccggcaactacgcatcaagcctgaaagcgcagcaggttgcggaagagaagggattttcccaggttttatggcttgacggcattgagaagaaatacatcgaagaagtcggcagcatgaacatcttcttcaaaatcagcggcgaaatcgtgacgccggagctgaacggaagcattcttgaagggattacgagaaattccgtcatcacccttctcaaacattggggactgactgtgtctgagcggaagatttcgatcgatgaaatcatccaggcgcatcgtgacggccgattggaagaaacattcggaaccggtacggcggcggtcatttctccggtcggcgaactgatctggaatgatgaaagtcttgtcatcggcagcggtgaaaccggagagatctcgaagaaattgtatgataccattacaggcattcaaaaaggcgcggaagccgacgtgttcggctggacggcgaaagtcgcctcactaagcgaatcaaaataagcaaaaaacccggaagcgaatccgggtttttttactgctcttatgcttcaatcgacttaaagaaatggggcagatgttctttgtgggcctcaagcatttcatccagaatggcctttgccacggagtctgacgggacaagagggttgatcgtcatcgcaagaagcgccgtttgataatctcccgtgacggctgcttcagcggcgacgcgctcaaatgatttgatttgctggacgagtccgcggacagacaccggcagatcaccgacggcgatcggtttcggaccgtctttcgtcatgacgcagttcacttcgaccgctgagtcattcggaatgctggcgatcgcgccgttgtttatcgtattgacgggctggatatcatgtttgtcgttatagatggagctgatcaggttgcaggccgcgtcactgtagtacgctccgccccgtttttccagctgcggcggtttgatggcgagattcggatctttgtacagttcgaacagttctttctcaaccttctgcacgacctcggcgcgtgtgccctccgtctgtgaagcttctatttcatgctcgagcatttctttcgttttgaaataatagcggtggtagccgcaaggaatcagatcgagcgccttcaggaattcaggctcccattccgctccggaaatgtttttcatcgtcatggcgttttccgggtctcccatcgcttcgatgacttgatccttcacgctgacgccgtctaagaaaacatctaacccgaagaccatgtgattcagtccggcaaattgcacttcgatccggctgacatccacatccaatgcttttgcgacgcccattttaatgccgatcggcacattgcagaggccgacgacttttgtgagattcgagtagcggagcaaggcctcggtaaccatgccggcagggtttgtgaaattcacaagccacgcattcggacaaagctcttcgatgtctttcgcgatttccagaataaccgggatggtgcgcagccctttgaataaaccgcccggaccgtttgtctcctggccgattacgccgtattttaacggaatccgttcgtctttggcgcgggcctcaaggagaccgacgcggaattgagtcgttacgaaatccgcatccttcaaggcttctctccggtcaagcgtcaggtgaatctctatcggaacacccgctttttcgaccatgcgttttgcaagcgtgccgacgatattgagttttttctcgccttcgggaatgtcgacgagccataattctctgacaggcagttcctcatagcgcttaatgatgccttccacaagctccggtgtatagcttgaacctccgccgatcgttacaattttaattctttttgtcatatttttgctcccccttgcagactcactttttcgtaaatctcgactaactcagcggccaagtctttcacggtcatggcattcattaaatgatcctgcgcatgcaccattaaaagcgtcatgtctgttttttctccgccggcttcattttggatcaattctgtctggtaatgatgggcttcggtcagttcccttgcggcttcctgaagcttttcctcggccatggctctgtccccctgctttgcggcggcaatggcttccattgatgcgcttctgccgttgccgccatgcaggatgatctgaaaaatggtctgttccattttttcattcatgtgtttcactccctttctctacagcacggctttttcgtctccctgtacggctggcgcctgcgattgttcaagttcgttttcttctttcagcttttgcgaatcccacattctgaagaacggatagtacacgataaaggctgtgatgatattaatcgcctgcatgacagcccctgatatttttccgcccgtggcaagatagccggagaaaatcggcggcatcgtccatgggacggcaatgccggcaggtttggcgacgaggcctgtgctcatgccgatataggtaaagaccagtgtgacaagcggtgtgatgatgaacggaatgagaagcatcgggttcatgacgatcggcattccgaaaataatcggctcattaatattaaagacagccggcccgatggcgagtttcccaagctgcttcatctgcttgcttcgcgaacggagaaacatggtgaccacgagcgccagtgtcgcgccgcttccgccgatgttgatccagatttcaaagaactgctgggtgaaaatattcggcagcgcatcgcctgcctgaaacgcaacacggttggcatccatcgctccgaaccagatcggcgccatgacgccgccgacaatgttcgccccatgtaatccgcacgcccacaaaagcatttgaaccgcttcggctaccaggcttccgccgagacttcccccaagaatcgagagcggcgtccccagtacaacgcttacaatgttatgaaggctttcaaacggcgtcgcttcgacaattaaacgcgcaccccagatcagaaagatgacggcaaagccgggaattaaagcgacaaatgatttgctgaccgccggaggcacgccgtccggcattttgaagacgaaattccgctggatgatcaggcggtaaatttccgtcgacagcatggcgatgatcatcgcgacaaacagccctttgcttcccatgagagacagcgggatgccgccgcccaccatgatttcctcttttgcgccggaaggcagaaacggaactttgtacggcgttgccaagagaaacgccgccaaagatatcgcaccggccgataatgcgtccaccccgtatttttcagccaggcggtaggcgattccgaaagcggcgacaaggcccatgatttcaaaggtcgcatcaaccggatattgcagtttttgagaccaggcgcttccgaacgtcttcgccatgaaatccgcatatcccggaatcggcaggttgccgatgatcagaaaaaatgaaccgatgatgataagcggcatggtgaggatgattccgtcacgcagtgcttgcagatgccgctgggaggcaatttttccggcaatgggcatgactttctcttctaaaaactggttcaccttattcacacggcccgcccctttctacgatgcgtttccgagctgttccgctgatttcagaacctccgctccgttgcaagtgccgtaatggacggtattgatgacttcaaccggcactccttttgattcacccaattttttcagctgcggaagcaaataacggacttgaggcccaagcagcaatacgtccgctttatcaatatgctggttgactgaatcgcctgacaccgcccagattttatattcttttccttgttcctgcgcgcttttttccatcttggtgacgagtaagcttgttgacatccctgctgcacaaacgagtaatatattcatgtaaaagacctcctgaaagtttgatattttgtatgtctcgatgttagtaacatcatattatgaaatcgctttcataactactcaggctttttccgctgctaacggaaaaaaggtgtatcccggtctttctctgatcgtttgtctctgaatactcgtaaaacctcctgataggttgtgcattttaagagacggcttaccgcggccggatcatccaacatgccgccgagccatttgtacatatgctggaggtcggctttgctttctttctcgacgcagagcaggcagacaaattggacacgcttatccgcccagtcaatcggcttcttcagcgtgcataccgcccaaaacgtcgtgtctgtctgcggaacgagcgggtgcggaatcgccgtaagattgccgaaactcgtaggagaaatcgcttccctttcaaaaatagaatcggtcagagaatcagaagcgaggccggcttctgcaacctgctgtccgagaaaacggatgacgtcctccttcgtctccagatcctgctgcaaaaataccagctccggtttcagaaagttcaattgttcccgattttcttccagcatggcgtcgatttttgtaaaatccccgccgcccagcagcgtatgaaccttcaatacgggaacgggcaggtcttttttgatcggcactgtgctgaccacaaaatcaatcgactcaaaggaaagctggtcaaggctgcagtaatcagccgttccgacgatttcaagacgttttgcgaaccgggaacggagcttttctcttaaaagctgcgcgctgccggcgccggacgcacagacaatcagacagcgtttaggcggccgttccgtctttctcctttcaatagcggctccgaaatgaagcgccaaatacccgatctcattttcatgaatatcaatgccggtttgctccttgatcacgattcccgcaatcactcccgcttcaaatgcgagcggataattctcctttatggcggagagcatcgggtttctcaggttcattccgtaccggtttcggttaatcgccggcttgatatggagcgcaagacccgctttcagctcattgtcgtccgtgattccgagcttcagctcccgctcaatggcttcaatcatggcctccgtcaaacggctggtttccccgtctatcagccttgtaagctcttttccttccatttgtgactgggtcatgcgctttgtcccgagcaggtgaatggcgatataggcggtttcctgttcgggaaaggtgaccgaaagcgcagattcaagctcttttacgatggcttccgctgactgatattctgtttcgagcttaatatcatgaagatcttccggaatgagagatacatagttttctgtccggattcgtttgcaggcaatggcgatatggatgatgagattgttcaggccgaagaaagaaagcgggatcttatggtttcgaacctgcttcataatggctgtgcggatcacatgaatgtcgtctttcggcagaataccggccttttcactcaggagatcaggctcgggctcgcggtcgtccactaagtattccgccatacaataacggaggcggagctcttcgccgcgcagcttaaagccgtagttcggccttgtttccaaaatgatgtcataggggcggagccgttttttgacttcttttaaatcagattgaagtgtggatttactgatgaacagttcttccgccaagtcatccagcttgaggtagccgtcggccagaagcattcttttcatcaggtaatctatccgttcatcgggaaaaatcggtacggtgctgttctgctggaaattgtcctgaagccagtttttaaacggctgctcattccggatcagcagcttatagccgctccctctgacagattgaatggatgcgccgtgtttttctacaatggtttgcagttcctttatgtcattgcggaccgtccgcgtcgttacctttacatttgcagcgatgactgagcttgtaaccggtgtttcagcagctaaaagcaagcgcagaagttcacgaagccgcccatgaagcatgagaaaaacctcctatcagatcagatgcagatgtgaaaaatgggcaaaaagaatgaggaaggggtaaatgtatgtaaattctatactggggaggatttcaagtcaatgcggcaatccgatgccaagaccgtaaaaaaacagccggatcagccggctgttcgggatgcggacatgcggttccgcttagatgccttccgttcttttatgatttttctgataatcggatagatgacgggcgcccatttgataatcgttttgaaaaattttttcaatgtctgaatcccctttcttttaccttgtctttcccctgttatcagcgtttataaacatggtcagcgtgagacataccggttccccgtcacccaatagcgccacggataatcccgggcttctccgctgttgtcaatcccgattctcgggcctgttgatatatgttcaggcgtaaagccctccgtaatatacagcggcggttccgtgatcatgccgccgtagtcgttcattgaaatgcccatcgccttcgtcagttttcccgggccgtttgtccactctctcggggtctgcccggtctcctgctctccatcaggaactgtccttcatgaggctccgccgccctgattaacacggcctgcggaatgccgatgtccgaggcgacgacgttcattaatgtatgagtgtgcatgacgtatgtataaatgcggcccgcctcatggaacataatttccgtccgtttcgtgcgccggttgccgaaactgtgcgccgcccggtcatccgctcccatataagcttccgtttccacgatataacctgaagccgttccctcatccgtctccttcacaaggagacagccgagcaataaaggggcaagctccactgacggtctctggtaaaattcaatcggcaaaggctttccttctcccgccatttgcctccctcctttctgaatatagcgatttcctctttcacgtttttcacttcttttttacaatataaacatgaaagaaaaaagggcatcattgttgaacactctattgcgttttgaaaatcggcccggtataatatgatggttcaaatgaaaatgattctcatattcaataaatgccggacaatgatcataaaagtaggtgaattgatttttgagcgattctgtcacgtccgcaagccgtctgatcagcatcttaaaaaacggggttttcttcctgatcgcggtgatcgggctgcttgtttctatttttttcgccgtctcattcggcgcgaaagacattactttacatacggtttggtcggctgttgctgattacaatccgaacataacgggccagcagatcattcatgaattgcgtcttccgagagtgctcggcgcggccgttacaggagccgcttttgccgcagccggcgccctcatgcagggtgtcacgagaaatccgcttgccgattcgggtgtcttaggcgtaaacgcgggcgccatgtttgttgttgcgctcagctttgcttttttccctcatttgtcatacgccctgctgatgatgatgtcatttttgggagcactggcaagcaccggcttgattttctttatcagtgcggcgggaaaaggcagcatgacacctttaaaggtgacgcttgccggggcggtcgtggccgcgcttttacattcactcagtaccggtgtagcgatttattacgatttaagccaggatttggccttctggtacgccggcggggtgtcggggatcaagtgggctcatttacaagtccttgttcccgtgattgcggtcttcatcattctcgcgacattcatgggccggtccgtcacccttctctcaatgggaaatgacgtggcggcgaatttaggggtgaacacggctctgacgcgtgccgcgggattaatgatcgccgtcgttcttgccggtgtgtctgtttccgctgccggcgcgatcggctttgtcgggctggtcattcctcatatcgcccgcaagatcgtcggcgttacgtacaggctgattattccgatgtccgcgttgctcggcgcgattcttttgattttggccgacttggcctcacgcacggtcagtcccccgagagaattggcgataggcatcatggtggcacttgtcggtgtccctttctttctttatattgcccgcaaggaagggagagacttataaatgaaagtgcagaaagaaacaaaaaaagcggcggcggcaggtctcgttctgctggtcatcgccgtttgcattattctgatcgggctgcacacgggctcattccggctttctcccctcaccgtgggaaaaacgctgttcggttacggcacgtttcaaagcacaaccgttttattcgattaccggctcccccggatactggtgacgatgctggccggtatcggcttaggcgtgtcaggcgctattttgcagggtgtatcccgaaatccgcttgccgatccgggcattctcggactgcatgccggcgcttccttcggtttgatgatgtatatcacattctttcattccctggaggcgcaggcgtcgatgttcatcccgctgtttacgtttgcgggcggaacactcgccgccctgctgatcgtagtgcttacgtacgacaggctgaacggttttttaacgatccgcatgctgttggtcgggatcgccgtttccgcgggcttcagcgccgttacattgtttatgtcgctgcgcctgaatgaagaaacttataccttcgcttcccgctggctggtgggaaacgtctggggcagagattggattcacgtgtggtcgcttttgccctggatcggcattctcgcaccgcttgcatggcttaacgcccggtctttgaatattttaatgctcggtgaccaggcagcggcggggctcggcgcacacgtgcagagaaaaaggatcatgctgatcgccatagcggtcggcttgtcctgcgcgagcgtcgcgatggccggcggaatcggctttatcggctttgccgcccctcacttggcaagacggctcgtcggcaccatgcatcagcatattattccgattgctggattaatcggccttgtcattcttgtcgcggcagacaccatcggccggtctttgtttcagccgaacgccattccggccggcgtggttgcggcagccatcggcgcgccgtattttctctatctcgtcatgaaaatcaaatcataaaacaaggagtattcccatgaaaaaaataattgcgctcatcagtttcatgtgtattttcttactggctgcctgccaatccgattcatcacagccggagtcaaaaaagaaatccggcgatcataaaatcgcttcgatgtccattcacctgacaaatgatctgctggctctcggcgttacacctgccggttccgtcgtgggcggagaattaaaagattttctccctcatgtgaaaaatcagctgaaagacacgaaaaaactcggacctgcctcagacccggatatggaagctttacttgagctgaatccagacaacatttatcttgataaagaatttgcgggaaaagatgtgtctaaatacaagaaaatcggaaacacacacgttttcgaccttgataaaggcacatggcgtgatcatttaaaagacatcggaaaaatcgtcaaccgtgaaaaagaagcgaaaacatttattcaagattacgaagatgaaacaaaacaagtcagatccatgatgaataaggaattagggaaaaacgccaaagtcatggcgatccgcgtgaacgcaaaagagcttcgcgtcttcagcacacgccgcccgatgggaccgattctgtttgacgatctgaagctgaaaccggctgacggcattaaagaaatgaatacctcccgcccttatgaagtcatttctcaagaagtgctgcctgattacaacgcagatgcgattttcgtggtcgttaacagagacgacaagtcacagcaagcctataaagaattgcaaaaaagcgctgtctggaaagggcttaaggccgtgaaagcaaaccatgtctataaaattgccgatcagccttggcttgattattcggcactgggaaataaattagcaatggatgaagcgaaaaaactgttccaaaaataaacatgagccggttttgcaaaaagtgcaagaccggctttttttatattgccgtttacttatataaatgtctgcttatataatagtgtaaaaaaggagtgagcgcatggaacggcggcataatgctttaagttccgaagggatcagccagtgcctcaaacttctaagcgacccgacgaggcttttgatgctgaagcttctggaggataaggaatattgtgtctgcgagctgacggctatttttcatataagtcagcccggcatcagccagcacttacggaaattaaagaacgccggccttgtgcgcgaaagacgcgagggccagtggcggtactatgccattcatccgtccggaccggaatacgcgctggtttgctcgattctgcagcagatagatgaaaaggacgaagttttacagacattgcggcaaaaagaagtcactgttacatgccggtaagggggatatattcttgggagttgcggttttatcagcgctgatttttgtgctgacacttgtgtttgtcatatggcagccgaaacatatatcaatcggctggtctgcctgcggcggagcggtcctcgctttgatcgccggagcagtcagcctgcacgatatcgcggaagtgacggggatcgtctggaatgcgacactcgcctttatcgccattattatcatttcattaattcttgacagtatcggtttttttgagtgggccgcgctgcatatggccatggcggccaaaggcagcgggctgcggatgtttctctatgtgtcggtcttaggggctgttgtctccgccctgtttgccaatgacggagcggcgctcattttgacgccgatcgtactggcgatggtgcgggctttgaatttacctgaaaagctggtttttccgtttattatcgccgggggattcatcgccgacaccacctcgcttccgctcgttgtaagcaatttggtcaatattgtatccgctgattactttcatatcgggtacattgaatatgcaacacgcatgctggtgcccaaccttttttctctggcggcaagcattttggtgctgtatctctatttcagaaaaaacattccgaaacggtatgacaccggtcttgtgaaacatccggcatccgcgattaaggatgaacgccttttccggttatcgtgggctgtgctggccgttttattgatcggatatttcgtcagcgaactgctgtcgatacccgtttccttcgttgccggctccatcgcggtcatttttctcattctggcgcagcgaagccccgccgtccctgcgaaacaagtcatcaaggacgccccgtgggccatcgtgtttttttctgtcggcatgtatgttgtcgtgtacggcttgcggaatgccggactgacggatcttctttctcagcttattcagaaagcggcggatcacggattgtttgcgggcacactcggaatgggttttatcgctgcgatcctctcctccgttatgaataacctgccgacggtgatgattgacgccatagccatcaacggaacggacactcacgggctgctgagagaagcattgatttacgcgaatgttatcggttctgacctcgggccgaaaatcacgccgatcgggtcgctggcgacattgttatggctccacgtgctgagccggaaaaacgtgaaaatttcctggggaatgtatttcaaaacaggtctgatattaaccattccgacgttattcatcaccctgatcggactttatttatggctgttatggctcgcttgagatgaaaaaccttttaagttgaatcttaaaaggtttttttgtgtcaaaaatccgaaaagtaaaacttttatattttaaaagtatagacatttaatttcaaaagattataatattcatgaaaacgttttaactttatgaaagaagggattcctcatgaaaagaattttattagcctgcagctcaggcatgtccaccagccttcttgtgacgaaaatgcagaattacgccagctccatcggtgaggaggccgagatttgggcagtcggacaggataaagcaaaagaagcgatgaaagacgcagacgtcgtactgatcggcccgcagatgagttttttaaaaggcgagcttcagaaagaggcggacccgcttcacatcaccgttgatgtgattgatatgatggcatacggcatgggagacggcaaaaaagcatacgaacaggccgtttccttgatagagaacaaataaaggaggcgataagcatggaaacgtacacggatgaacagatcagttttcagctgattcttcacagcggcaatgcccgcagctgtattattcaatcgatacgcgcttataaagacggccggccagatgagtcagacacctttctgacaaaggctgaagaagaactgggaaaagcgcacgacatccattttcagatgattcaaaaagaagccggcggcgccaagacggatgtctccctgctttttatgcatgctgaagaccacttaatgtcagcgctctcaatgaaagagatcgtcaaagaaatgctcgacttatttcaatcaaagaatttataaaaagccgggggtgaagacgtgtttgagaaaatcagccaattccttgttccgatcgcgggcaaattaaacaataaccgctacctgcaagtcttacgggatgcttttatgctggcgtttccgctgaccattttcggttcggtgttcgtcgtgctgacgaacctgccgtttttaaacaaaatcatgagcagctccgccctgtctgtctttcaatccggatttggcggcgcttcgacggcgacgatggggattatgtccatttttgtcgtcttcgggatcggctattacctttcaaaaagctacgaagtggaggccgtattcggcggagcgattgcattggtttcttttctgctgctcaccccgttcgtcttagagccggaaacgggcaaagcggtcgcaggcgtcattccggttgaccggcttggagcaaaagggatgtttctcggcatgataaccgcttttttgtcgggtgaaatctacagaagaatcgtccagagaaacttaacgattaagatgcctgccggtgttcctccggctgttgctaaatcgttcgccgcattgattccggcttttatcacgcttaccgtcttcctcttgatcaatgcggctgtcacccagatctttcacaccaatctgcatgatgtcatttatcatacggttcaagccccgcttgtcggacttggaagcggcatcattcctacattaatcgctgttttctttattcagattttatggtttttcggacttcacggacagatcattatcaattccgtgatggacccgatctggaatacattacaggtcgaaaatttggctgcgtatacagcgggaaaagagattccccatattatttctaagccgtttatggagatttacaccgtcggaatgggcggaaccggaatgacattggccatagtgatcaccatcttgctttttatgaaaagcaaacagatgaaacagatatccaaactcggtctcgcgccgggcattttcaacgtcaatgagccggttattttcggtttgccgatcgtgatgaacccgatcattatcattccgtgggtgatcgcaccgatggttgtcacgctcgtcacctacctggccatgtcggcggggatcgtgccccctcctactggcgtgaccgtgccctggaccgtcccccttttcattaacgggattatggcgaccaattccgtcatgggcggcattatgcagctggtcaacctctgtattgtgtttattatctggttcccgtttcttaaagcgctggacaaattaaacatggcaaaggaaaaagaagccgaggccgagcagcaagcacgggatgacagcatgagtatgtaatcaaaatcgcagtaagggagagaaatcaattgactgaatcaaatattcaatatcgttttccggaaggattctggtgggggtcttccgcctccgccacccaaacagaaggcgccgccgacaaagacggaaaaagccaaaacatatgggattactggtatgaaaaagagccgagccgtttttttaacggcgtcggccccggcgacacgtcacgtttttatgatcaatacaaggaggatatccggctgatgaaagaaatcggccacaactccttccggctgtctatttcctggtcaagattgattccggacggaactggcgaggtcaatcagaaagcggtcgcgttttatcaggacgtcatcgatgaaatgcttgcccatcgcattgagccgtttgtcaatttgtttcactttgacatgccgctcgcccttcagcgtaaggggggctgggtcagccgggacaccgttgacgcgtttgaacattacgccaaaacatgcttttcgctattcggtgacaaagtgaaaaaatggttcactcacaacgagccgattgtgccgattgaaggcggctacttatacgactttcactatccgaatcacgttaattttcaagaagcggtgcaggccggcttccataccctgctgtcgaatgcaagggctgtcaaagcctacagagaattgaaacaggacggacaaatcggaatcattctgaatctgacgccttcttatccgagaagctcacaccctgaagatctgaaagcatcccggattgccgacgcctttttcaaccgctcatttttagatcccgccgtaaagggcgaatttcctgaggagcttgtcgagattctcaaggcggaaggctttctgccgcgttacgagaaagaagatctccgcctcattcaggagcatacggttgacctcttaggcgtgaactactaccagccgagacgcgtcaaggcaaaagaacatgttccgaatccgcacgcccctttcctgcctgagcgtttcttcgatccgtatgttatgcccggacggaaaatgaacccacaccgcgggtgggaaatatacgaaaaaggaatctatgacattctcaccaatctcagagaacattacggaaatatcgaatgttttatttccgagaacggcatgggagttgaaggcgaggaacgcttccgcgatgaaaacggcatcattcaggatgattacaggattgaatttatccgggaacatctcaaatgggtgcatcgggccatcggagaaggttcaaatgtaaaaggctatcacctgtggacttttatggacaactggtcttggacaaatgcttataaaaaccgctacggctttgtatctgtcaatctggaaaacgggggcgaacggaccgtcaaaaaaagcggccgctggttcaaagccgtttccgatcaaaacggattttaacagatgaggaggtacagccatgcttggaggtattgaagccggcggcacgaaatttgtctgtgccgccggacaaaaagacggcaccattctggacagggcggagtttccgacgggagaaccggatgacacactcagacaagtcatccgttactttaaagatttcccgatagaagccatcggcatcgggtcgttcggaccgattgacatccgccccgacagtcaaacatacgggtgcatcaccgcgacgccgaagacagcctggcggaactgccctattcttcaaacgatcaaaagcgcactgcatattcccgcaggcttcaccaccgacgttaatgcggcggcgctcggagaagcttctttcggcgcggccaaaaacgcggacagctgcctctatttgacggtcggcactggcatcggagcgggcgccatcatgaacggcagatttgttcaagggctgtctcatcctgaaatgggccacatttatgtcagaagacacccggacgacggctacaaaggcaattgcccttaccatacagattgcctggaaggcctcgcggcaggtcccgccattgagaaacgctgggggaaaaaagcatatctgctggcggatcagcaggaagtgtgggagcttgaaggctattatattgccgaagcgcttgtgcagtatattctcatactttcgccggaaaagatcattctcggcgggggcgtcatgaagcagcatcagctgttctcttatatccgtcagcacgtgaaaaagcggctgaatcaatatattgatctgcccgacattgaacacttcatcggtccccctcaattagggattcactccggcgcggccggttcgctcgtattggcggagcgcgcattagagacggcaaaccgggaggcgggaaaatgacgaaactcttatttttggaaccggtttttaaagaaagattatggggcgggacgaagctgcgcgatacattcgggtatgagattccttctgagcggacgggagagtgctgggcgatttcagctcatccgcacggtacatccatcgtgcggaacgggccattttccggaacatcattacaccgtctctggaatgaacaccctgacctgttcggacatccgaaagaagaagcttttcccctgctcacaaaaattcttgacgcaaatatggacttatccgtgcaggttcatccggatgacgcatatgcacatcggcatgaaaacggagaactcggaaaaacggaatgctggtacgtgttggactgcaaaaaagacgcggagctcattttagggcaccgcgcccaaacaaaagaagatttcgttcggctcattgaacgaaacgagtgggatcacctgctccgccgcatccccattaagcccggcgactttttctatgtcccgagcggcacactgcacgctttatgtgaaggtacgctcgtccttgaaatccagcaaagctctgatgccacctaccggctttacgactatgaccggacggatgggaacgggaataaacgcgagcttcatcttgagaaagcaattgacgtaacagacattccccataccgatgaaaatgtaaaaagcactaagcatcggatcggagatgctcttattacgatactcgccgaaacacctttcttttcagtttatcaatgggatgtgagcgggaaagcatcattccccgcacccggccggtatttactcgcaagcgtcattaaagggcgcggagaactggatggatgccccgttcagaaaggcgatcactttatcgtgccggcggattccggagattttgttatagaaggagattgtgaggttatcgtttcacatccttcatcatcttaaaaatcaggaggtcttttatatgcttaaaaagttagcagtctgcctgtctatcgttttattactcttaggagccgccagtccgatatcggctcacaccgtttatcccgtcaacccaaatgcccagcagacgacaaaagatatcatgaactggctggcccacctgcccaaccgttcagaaaacagggtcatgtccggagcgttcggcgggtacagtgatgtcactttttcaatgacagaggaaaaccgcttgaaaaacgcgacgggacagtctcccgccatctacggctgtgactatgggagagggtggctggaaacagcggatatcaccgatactatcgattacagctgcaacagcagcttaatctcatactggaaaagcggcggcctccctcaggtcagcctgcatctcgcaaatccggcctttccatccggaaactataaaacggccatctcaaacagccagtacaaaaacatccttgacccttcaactgtggaaggaaaacggcttgaggcgctgctcagcaaaattgccgacggccttactcagctgaaaaatcaaggcgtcaccgttctgttcagaccgctgcatgaaatgaacggcgagtggttctggtgggggctgacaggctacaaccaaaaagacaatgagagaatctcgctgtacaaagagctttacaagaagatataccgctatatgacagagacaagaggattggataaccttttgtgggtgtattcgccggatgccaacagagactttaaaacagacttctacccaggctcatcttatgtggatattaccggtctggacgcttacttcactgatccgtatgcgatatcaggctatgatgaaatgctgtctctgaaaaaaccgtttgcctttgccgaaaccggtccgtccggcaatatcggaagctttgattatgctgcttttattaatgcgatcaggcaaaaataccctcagaccgcgtactttttgacatgggatgaacaattaagtccggcggccaatcaaggcgcgcaaagcctttatcaaaacagctggacgctgaacaagggcgaaatatggaacggcgggtccttgacgccgatcgcggaataaccgcttcttttgaaaatcggttttaaaaaacggctctgctgggcatattgttaccgttcaaaaaggagggttcaacaatggaaaataacaaaaacagcgaagaaacgctttccagtaagacgaccggtaaaggcgagtcagaagacacgctgacaaaccggcagggccatccggtcactgacaaccagaatgtcaggacagtcggcaatagaggaccgacgacattggagaattatgattttttggagaaaatcagccactttgaccgcgaacggattcccgagcgcgtcgttcacgcgcgcggcgccggcgcacacggatactttgaggcgtacggaagttttggagacgaggagatttctaaatatacaagagcgaaagtgtttcaaaagaaaggaacgaaaactccggcgtttgtgcggttctctaccgtcaaccacgggaagcattccccggaaacattgcgtgatccccggggttttgccgttaagctttataccgaagacggcaactgggatctggtcggcaacaacctgaaaatcttttttatccgtgatccgctgaagttcccggatcttgtgcacgcatttcagcctgatcccgttacgaacattcaggacggcgagcgtattttcgacttcatttcccaatcaccggaagcgactcatatgatcactttcttgttttcgccgtggggcatcccggccaactaccggcagatgcagggctcaggcgtccatgcctacaaatgggtcaatgaagaaggaaaagccgtgctcgtcaaatatcactttgaaccgaaacagggcatacgcaacctgacacagaaggaagcggaagagattcaggggaaaaactttaaccatgcgacacaggatttgtatgaggcgattgaaaaaggcgattaccctgaatgggaagtgtatgcgcaaatcatgactgatgacgagcatcccgagctggattttgatccgcttgatccgaccaagctgtggtataaagacgatttcccttggaagccgatcggcaaattggttctgaacaaaaacccggaaaactaccatgccgaggtggaacaagcatcattcggaacgggcgtgcttgtggacggccttgatttttcagatgacaaattacttcagggacggacattcgcctattcagatacccagcggtaccgcgtcggcgcaaattacctgcagctcccgatcaactcgccgaaaaagcatgtcgccaccaaccaggaaggcgggcaaatgcagtatcgggtcgatcgggcagaaggacaaaacccgcacgtcaactatgagccgtccattatgggaggactcaccgaagcaaagcaggatgggaaagaccatacacctcatgtcgaaggcgatgtgaagcgggaagcgatcgaccggccgaataacttcggccaggccggtgaaacataccgcagattttcggaatttgaacggaccgaattgatcacaaacctggtcaatacgctttcttcctgccggaaagacattcaggatcaaatgattgagaatttcacaaaagcagatccggactacggaaaacgtgttgcggaagggctgaaaaaagcctccgaaagcagcagcggcgggccgatcggcactactgatacagcacaagccgcaaaacaggctgaacaggaaagccatccgtctgatccgtattaaataaaaaaacaggacaatcgcgtcctgttttttttttgagctaattcagctcctgtatattctgctccgccgcggccgcaaatactttcggctccggacggtcaagatcttcatggaataaacttactttgtgaatctgccggttgtcgtacagatgaaagtagtagttcccggtgtcacagcacatgaccgacgtatattgcgtataatcaatttcattctcctctgtgatcaccgcgccttttggaatattcacattggacagcacgtgaaaagcggccgtaacgccatccgtttcatgagcggcaggctctaaatgctctttcagataagcggctctgatgaaccgggatggcggcgtgtaatcaccgggaagcccgatcgttccagatccttggccgaaagcggttaatgtcattccgcccaatgttttgctttctgactgctgcggcctgattccgatataatggcgcagattggtcacatgccaaggaaattccggactgttggtcatcactccgggtttgttgtcatatactttcattccctccggtgtcggctcgatgacaatgcagccgcccgtgcggtctgataaaatccaatgaagaggcagcaccgtatccaataacattaacttcttctctacaatcgtcagcattgagagcttttcctttatgtcttcaagagattcacagtttgataaggcccaggtgacaaactcatgaggagcgatgtgacaggtgccctcccgttccgctttctcgtatcccgcaaagcccggaaaatacagcgtcgcacacgacagccctttttcatttacgccgtcggcaaacagaacattgccgagatttctccccatgccgataaatgcgtatttcgtcttatgcatcctgccgtcagcttcgcttttccagctgtactgacgagggtaaagcacgacgtccgtaccgagctgaaatgcaaaatccatcgttcgcgccaataggtgattgccgtctgtcgttttcaatgtaagacttgtacacatatcatcaatccccttttcattaatgaaatttacacaaagtaaactattctttcagcttaacgaataatggctccattcgtcaaaagattgacacatttctccttcatacatattagtcagtaagcatatccataccttttaatccctggtaaatcgtttaggcggcagtgtttgttccgtttttcaaaaaactttgaacggctgtcagcgaggctttacaatgtttttcctgcatgctggaatttgtaaacggcaggtcaatctgttaagctatgtctttatgttaaagaagaacatacggaggagattatctattgaaagtagaaaggcgaacgattgaacatattccgcatgacgaaagacacggaaaggctaaagatttattccccgtctggttcggggctaatatgcatattacgacgttagtcacaggcacactgcccgttacaatgggactcgatctcttttggagtatcgccgccattgtgatcggaacctttatcggcgcaatctttatggcgtctcattccgcacaaggacctcagctcggaattccgcaaatgattcaaagccgcgcgcaattcggcgtgatcggagcgattctgcccctctttttggtcatgtttatctacctgggcttctttgcgagcagtacgattctcgcagccggtacactgagcagctttgtcccgattccggcttcatggtgtattatcggcttaagcgccatctgttttttactcacgatctacggtcatgatctgattcacaaaatgcagaaaatcctctcttggacctcctttgccgttttttttgctgcaacgattcttatttttcaactgccgattccttcaggaagctgggtgcccggctcattagatctgcctgtttttctagtggcggtcagcgcggtggccacatggcagctggcatacgcgccatatgtcgcagattattcccgttatctgccggtcaaaacaccggcatcgcatactttttggtacagctatgcaggtacgtcagtcagttccatctggatgatgcttctcggcgccattttgacgacggcgctcccggaatttaccgctaatgcgggaaatgagattgtccgattgttcggtccgttttcctttattatgctgatcatcgtcctgttcgggcaaatggcgatcaacgtctttaatttatacggagcctttatgtcaaccacgactaccttggagccgtttttaaaactgaaggtgacgccgaaaacgagagtggtaatgatcctttgtgtgacggcagcgggtactgtattaagtctcttgggccaaagcaatttcatggaactgtttttaaatttcatctttttcatcagttatttcttaattccatggacggcgatcaacctcgtggattactattttatccgccgcggaaaataccacgtcaaatcgatgtttgacgtcaacggacaatacggcagggtcaattggattacagcggccgccttcgttttgtcgattatattagaaatcccgttcatcaatacatccttttacatcgggccgctcgctgaaatattcggcggaggcgacattgcctgggtcatcggcctggccgttccgtcgctgctgtattatgtcctgatgaaatcaaggttaaaacaaaaagaggcgccttccctatgaagacgccttttctttattcatattccttccatacacccggcagcagttcagaaagttcgtgcgccaataaggtatgggcggagcgctctttcgtccataattccgcacattcgccgtgaaggcggacggcgttcaatacggcgtgcttcgggtcttgatgacagcacagcatgccgagaatcattcccgacagcgtgtcgccggtcccgccttttgcaagcgcgccgtttccggttgtattcctgcggcattccccgtcgggaaaagcgataatggtttcgtttcctttcaggacaatcgtgacatgaagccgctccgcccattccgcggcatattccgctctgttctgctgaatctcttgaatcggaaggcctgtcattctggaaaattcgccgggatgaggcgtcaagatcacgggagctttcctcttcggataggttcttttcgtaatggcgcccgcatccagtatgacgggataatcgccagaaagcagctgatcagccgcctgctgcacctcgtctgtttggggaaggcccggcccgatggcagcggcccggatggtttccccgggctggcccgccgcggcttttatccacccgtcccgccagtacgtggcttccggcagcaccgggacgataagcggaatgacgcctgccgatgtaccgatgacgagcttgccgacaccgcttctcatcgcacccaatccggctagaagggcggctcccggcatgtcatcgctcccggccagcaataacgccgtcccgaacgtgcctttatggctgtccgcctcccgtttcggcagcgtatctttcacatcctgttccgtccaatccattatattcatctctgtacctcctcttctgtctcctatttatattccaaacaagaagagattttaaaccgcacaaaaaaacagccgctcgtttgcggctgtttatgttctgatcggaacatcaagacggtaaagcttccggtaccgttcgttttctgcaagcagctcttgatgggttccttccatttctgcttttccattttctaaaaagacgattttatcagctgtttccacacccgctaaatggtgtgtaatccagaggatcgttttctctttaaagacatcaaaaatcgtatcaagcaattctcgttcagtgaccgcatcaaggccgatcgtcggttcatcaaggataatgaccggcgtgtcttggagcagaatacgggcaagcgcgatccgctgccgttccccgcctgagaaacgaatccccgtctcctgcacggacgtttcatatccgtcaggcagtgattcaatataatcatgcagcttcacttgccgagccgcacgcttaacatcttcatcactcgccttgccgtttccgagccggatattgttcataatgctcgtgttaaagagatgaggtttctgattcaaaacggccaccgctgaggaaatctgctcctgcacggccgcagtttccagcccgttcagcatcaccttgcccgaatcgggaactaaggcgccttcaattaaagcgagagaggtcgacttaccggagccgctcctgccgagcagcgccattttttccccctggcggagagtgaaggaaaaacggtcaagcacatgactgtgctgatcataagaaaacgtcacgttatcaaatgtaagtgtcacatcggatacatccagtatctcatctgtctgcttcacctcacgacttcgcagctccggagccgccttactcattcttttgatggaatcctgataagaaggcacttccgtcagcgcatccgaaaggggcagaaacgcctccgtcaatggaaatacgacaagcacaaaggctgcgatcatcgtgttggcgatgctgccgtccgcatactgacccgccgtccagaacagcatgatcaatatgaagccgccgacaaggcattgcgcggcgagatcacgccatctcgtaaaccgctgacgtttgctttcaaggtcaaaccatgccttctctttctcttcataagaggaaataaaggccgcctgtcgtcccgagaacatccagtcgctcacgccgagcacggcatctgtcagccggctgtagagcgtattccggccgcttttcagcctcatgtttttcgctctcgtcacaagaagcgacacaaccggaaacaatacaaccaatataaacaggtaaatcgccgcaaaagcggcaaacggccaggaaaaaaagccgagtccgataacggatgccgcatacagcagcaaagcggaaaccgccgggaaaatcgtttttaaaaacgcatcctgcaaatgctcaatatcctcagccaaaatgccgagcatgtcgcccgtccgaaaacgggatgaaagcatgagcgaggccggctccagcatattgtaaagccgcaccctcatatcggacacgattttcaaaatgatatggtgccccgtcaggcgctcggcgtaccgtgagactgaacgggcaatcccgaaggtgcgcacggccacaatcggaacgtacaccagcaggatattctcaggccttgtcgccgacttagagatcaaaaaaccggaagtgaacatgagaaaggccgccgaaaaaatcgtcaccgcgcctaaaaaaatcacaagaacaaacaaacgggcattttgctttatatacggcagaatccattcttcttttctcatgttctttcccccagttgcgcctttacaagtttggcatatacgccttgtttcgccatcaattcgtcgtgggtgccgatttccgccaccgcgccgtcatcaagcacgataatttcgtccatctcaagcatccagtgaagacggtgagtggccagaaagacaagtttgttttcaaacaggtctttcatcgtttcttttatttcatattctgtttcaatatcaaggtgagcggtcggctcatccaaaaggagaatcggccggtttcctaaaaaggctctggccagcgcgacacgctgagcctgccctccgctgagcgcccgtccgccctcgccgatccggccgtcaaggccgccgggcagatcgcggatcagtccggaaagacccgctgaatcagcagcgcgcgccgtttcctcacgggaagcatcaggatgataaaaccggatattattcataagcgtgtcatcaaaaatgtacggatgctgcgggatataaagcagctgcttctgccagccgtctgactgcagatgcgagcgggattcaccgtttaccttgatctcaccggacgcaggctctaaaaagccgcccagcacatcaatgagtgtcgattttcccgcaccgctttccccgataattccgattttcttcttccctttaaaggacagatgaaattcagacatcgattctcggacggacaaacgcgtaagctgtaattcatccccgtcagtccacgtatcaagttcgagcggcttttcttctttaaaaccgggctgcgccaaaatcgcttgaatggttttccccgcctcctgcccgtttaacgtcgcgtggtaatcatttcccacttcgcggaccgggagaaaatattcaggcgcgagaatcagcgctgtcaatgccggaccgagcagaatttgtccgtctatcagccgcaggccgagaaacacagccactgtcgccaccgacagcatcgtaaagaaatccagggcgaatgatgataaaaacgcgacccggagcgtgctcatcgtcgccttgcggtatctctcactgacatgaaagatgtttttactgtgtgatttgcttaaccctaaaaaccgcaatgtctccagtccgcggagcgaatccacgaaatgattggaaagcgtctgataggacttccattggcgatcggcttttttctgtgcgacaagtccgagcaggatcataaatacaatcaaaatcggaagcgcaagaatcagaatcaaagccgatgttttatcctgaaaaaacacgtaaataacaacggccgccggcacaatcgccatgctgaccattttcggcagaaacagctctaaataacggcggaactggctgatgccttccatcgccagcgtcaccatccggcccgtcccctcttttttcgcaaagcgggggccgagacggaacaattgctcaagaaatctttttcttaagtctgcgccggtttgcgcggcatattggtacacgattttctgccggaccgcggttaccgcatgccggaccaaaaacgcaagcaggaaaaagccgataaccggataaagagaagcaatccgcttcccgttaaataatccggttaccgcctggctcagccattccgcctgcaagatgatggcggccgtttgtataatcgttaatcccgtaatgatcgcaagaatccgcttcattcctttataaagaaacaggtcttttcccattaataagtcataggctccttatggctgacgcgtttccggaagacataatagctccagatctgactgccgatgacaaacggcagcagagtcagtgcaacaattgtcatgaccttaagtgaataatcaccggaagacgcgttagctactgttaagtcatacgcgcttttcagcgagctgaccatgacgcgagggaacagagagataaaaatcatcgcaactgtcaaagcaagacccgcgccggtcataccgaatgcccagccgtcttttttcttgctcatgaacacaacagcaagaacgttgcagatgacaatcagcacgaataccggaatcgtgatgtttgcccggcgtgtaaacatatccgtatcgtatgcagacatcgcaaagaaagcaagtacaacaagaaagataacaccgattacgcgttttgccatttttctcgcacgctcttgtaaatcaccgatcgtgcgcagtgtgacaaacattaaaccgtgcaggaatgaaagaagggtgacggctgctccgccaaggacggaatacacgttcacaatatctgagaaacccgcatgcatattcatatggccgtcaatcggcatgccgcggaacaagcttgtgaagataaggccgaatacaaacggcgggataaggctgccgaagaaaatcacccagtcccatgttttgacccattttaaatgattcacttttccgcggaattcaaacgccaccccgcggcccattaaagcaagaaggatgatgataaacggaatataatatccgctcagcatcgtcgcataccagttcgggaatgccgcgaagatcgctcccgtacctgtcagcagccatacctcattcgcatcccagaacgggccgatggtgttaatcagcactctgcgttctaattcattatggccaagaaatcgggtcgaaatgccgacaccgaaatcaaaaccttctaaaaagaaaaatccgacaaacaaaactgaaacgagtacaaaccaaagatcatgaagtgaccccatggtagacctcctgactgaacggatccgttgatacaggaacatccttgtgatcatcatggtccgcaccttttttaatttcacgaacgaataggaagacaagcagcgcgcctaaaatcaagtacatgacgccgaaaccgataattgaaaacagcagagatcccgtcgttacgttaggcgaaacggattgtgcggttgtcatttgccccataaccgtccacggctggcggccgatttcagtcataatccatccggcagagttcgcaatgaacgggaatgcgatcagtgcgatcatgccccgtaaataccacttgctcgtatgaagctttttgcggcggttcagaataaagcctgcaatcgcggcaaaaatcataagcgcacccgctcccgccataatgcggaaactccagaacgtcgttttaacaggcgggatatagtcgccttttccgtacgttttttcatattctttttgaagtgttttcatccctttcacactgccgctgaacttctggtaagccaagtagctcagtgcgtaaggaattgaaatttctgatgtgtttttttctttattcgtatcaatattcgcaaaagccgtccacgcggcaggatcaccgctgtcatcccaaagcgcttcactggcggccattttcatcggctgcgattccattaaatgctcagcctgcatgtgtccgctgaacgcaacgccgataccggcgatcagaccgacaatcatcgaaagcttgaaagatttatggaagaaaggcacttcttttttcttcaataatttaaatgcgctgacaccggcgataaagaaagcacccgtcgcaagcgctccgaaaatgacgtgagggaattcaacccaaagctgagggtttgtcaaaagcgctccgaagtcattcatttccgcgcggccgtttttaatcgtaaagccgaccggctcctgcatgaatgagtttgccgtcaaaatccagaaagatgacataatcgttccgaaggatacaagccaaatgcaaagcaaatgcacttttttagataaacggtcccagccgaaaatccataatccgataaaaatagactccataaaaaacgccaaaagcgcttcaatcgcaagcggagccccaaatacgtccccgacaaaacgggaataatcagaccagttcaatccgaactggaattcctgaagaatccctgtgacgacgccgacagcaaagttaattaaaaagagatgcccccaaaatttagccattttgagataggtctcttgttttttgacaacataaagcgtctccatcaaagcaaccataaacacaagcccgatagacataggcacaaacaagaagtgaaacaatgttgtagatgcaaattgaatgcgggctaataccaactcactcatgatgtttttcctccaatctggtaaattgctcaacatttcacaaacatagtgaaatcattgctcggtatttcacaaaaaatgatatatttgctcaatgtttcacaaattcgtcaaaactattgaaatatcagcctgtacaccctgggggacagcggctgtcatagaaatgattcaatatcattactttacaacgattcagcccaaaaaaaaagatcaatatacctaaaatcaggctgaaattgtgactgattattgtcggatttgtagagattttatgtcagcacctaggatatttgtccctttgatatcgtacctcttttttattcgtgtggcgaacaaaatgcttttctcggtgaaaaagcccgccaaatcgccattttgagaaagaaaatgtgaagaaagcatgtcctctagtaaattcataatatatgaacaatttaaattttttagtatactttaaatggggatattttttcactacataacgactgggggaacaagcatgggagaacttcaaccaaaattgcaaacggattcaatccaaaaacaggaacggactgataactggtttgccagagcaatgaatataagaatcggcattattcctcttcctatctatatcctgcttttcttgcttattacggtgtttgtcatgagccgtgatgtaaaaagcgacattctgacatcaattgccgtcatgagttttttcggatttaccttcggccagatcggaaaatccattccgatcgtgcggtccatcggcggccctgcgattctcgcaacctttattccatccgctgtcgtctactaccacctgcttccgaaagacattattacttcaacaacagaattcacggaaagctccaactttctctatctatttattgccggtatcgtcgtcggcagtattctcgggatgaaaagagagacgctcgtcaaagctttcgttaagatttttattccgctgatcgccgggtctatcgcggccgccatcgtcggcttatgcgtcgggacgctgctcgggctcggctttcagcacacgctgctttatatcgtcgttccgattatggcggggggtgtcggtgaaggcgcgattcctttatccatcggctactccgatattatgccgatgtcccagggagacgcctttgcgcttgtgctgccgtccatcatgctcggcagcctgtgcgccattatgttatcgggtttgctgaatgtcatcgggaaacgcaaaccggaatggacgggcaacgggaaggttgataagtctgatcattccgctcccgcattggaacagccggccgatgataaaacgtttgatttgtcctttttcgcttcgggcggtattttagcggtttccctttatttggtcggcatgctggcgcatgatttctttcagcttccggctccagtcgtgatgctcgtccttgccgttctcattaagctgttcaggctggcgccggcttcgattgaaaacggagccttcggcgtctcgcgctttttctcgacagccgtgacctatccgctcttatttgcgatcggcgtttcaatgacaccgtgggacaagctgattgcggcgtttacaatcagcaacatcattaccattttatcaatcgtcgtcacgatgatggccgtcggttttctgaccggaaaatggctgaatctgtacccgattgaaacggcggttattaatgcctgccattccggccagggcggcaccggcgacgtcgcgatcttgagcgccgctgaacggcttgagcttatgccgttcgcccaagtgtcgaccagaatcggcggagcgattaccgtgagcgtcacccttctgctgcttcatcaattctattaaactgaaaaaaagcctccgcatatgcggaggctctgttatttcatcacattttgaatataagagccgaatgccgcgccggacatgcccggcgacacacggacgcggtgaagcccgtaaagcccctgatctctagacgccgctcccggctccgtcgtgaccgccatacggtagcctgacgaggcggcggcttttaatgtttctttattatatcgtccgacagggtagctgatcatagacgtccgctgcccgaacatttgatcaaataaacgcttagagtccttcatttcacgtcgctgctgctgcggtgtgagcccgttcaattcgagatggttcatcgtatggctctgaatggaaatgccgtgggcggccatctccttcatctgcttctcagtcagatgattcttatgcccgataaagtttccgatcataaagattgtcgctttcatcttgtatttctttaaaatgggataggccgctttcacattgtctgtatagccgtcatcaaatgtgaccagaacacatttttcacgcggctccttatcctccgtcagcatcagataggcctcttcaggagtcatcgtataatagccgtgatcatgaagccacttcatatgctgccggaattcttccttcggcacacgcaggctgtttccctctgaaatgctgtgatacatcagaatcggcagtctcgccatccctttcgtttgaacccaggcggacgtatccggctcttttttgatttgccgctttacggactttttttcgctgtgcgcttctgccttcggaatgctttgttcggcgcttgcctcatgacccgagcaggcggcaagtgtaaacacggcagccaaaaggcacatgcacatgatcatgcgtttcatcgttttcctgctttctgtcttctatttactttttatatcggttatgcgtcataaattgttacatcaaaaaaaccggacatccagctgtccggctttgcgttatgagcggattctgatttctgtttcactgtcaaaaaagtgagccttattcatgtcgaaagcgacggtcaattcctcaccggcacgaatgtcatggcgggcgtcaatccgggcgataaaatcctgatccccgatccgggaataaaccataatttctgacccaagcaattccgcgacattgattttagctgtgatggatgaattcttataagattctaccacaatcagctcgtcatgtatgtcttccgggcggatgccgaagatgatatctttgccggcataccctttttcccggagcattttcattttcccttccggcacgctgagagcggctgaaccgatctgaatggcgccgtccgtcagctttcctttgaaaaagttcatcgccggagaaccgatgaacccgccgacaaatacgttttcgggatgttcatacacttctttcggggtgccgatctgctgaatttttccgtccttcatgactacgatgcgtgtcgccatcgtcagtgcttctgtttggtcgtgcgtcacatagattgtggttgtttgcagcctttggtggagcttaataatttctgcccgcatctgcacccgaagctttgcgtccagatttgacagcggctcatccattaagaacactttggcgtccctgacaatcgcccgccctaatgcaacccgctgacgctgtccgccggagagcgccttcggtttgcggtgcagatactctgtgagccccagcattttcgccgcttcttcgacacgttttttaatctccggtttcggcatcttcctcagcttcagaccgaatgcgatattatcatagaccgtcatgtgcggatataacgcatagttttgaaacaccatggcgatatccctgtctttaggagcgatgtcattcactctcgtgtcaccgatatagaaatcgcccttcgtaatgtcttccagcccggctaccatccgcaaagttgtcgacttgccgcaacctgacggaccgacaaacacgataaactctttatctttaatatgaaggttaaaatcatcgacagccgcttctttttgatcgtaatacttataaatatgctcgagccgaagttccgccatgtatatccccctttatttgtaaacgctttcttaaataggattgtaacagcgtcagacggcggcggatataggcaatgttcataaaaaaagaccgctgtcttcgtgcacatttcccatttaatgtgatttttcatattgcagacaaatgaaataagccagcagggcgccccgatatgtcttaatatcaatacctgagcgttccgcaaatttatcaatccgatattgaagactgttgcggtgcaaatgcagttttttcgatgtgagcgacatgtttgagttatgttcaataaaagtctgaatcgtatgcttcagctccggttctttctgaaacagcagcgccgcttcttcgtgaagcaaggctgagagcttttctctgctttcctccgtgagcatggccggaaataccgtttccgcggtcagcgtgctcagctgcgggagatgacgccggccgatctgacaatattgctgttctctctgataatgaaggcgcagacgttcccccttgcagtaataccttccgacgaaaaaacggacactgaaataaaaatcgccttcgagaatcttcacaaaagatgcgatgtcatccgaatctggcgcttccagcttttcttcctccacaatcacgccatgatccctccccgtccggacaactgtatatgaaaccggccagaaatggcgcagcgcttctgtgaatgccccccagtcccgttctcccaataagtcataatggataaaacggacacgcggctccttgacatcaggcaccggaccttcttccagcagaaaacgccgccacctctttgctgccgccgtctccggaaaaaaaacgcctttttcttcagcgggcgtcaaaaatgattccagaagcagtttctccttcggggtgatatcctccttcggaatggcgacatagacccgccttttctcatcataaaagcaaaagacatcctccgccgtacagcacgtatcagacaacacagccctcgggtaaattgccaataacgggttcatatgcgctcctttctatcgctctatcatattttcagtataaaacgtccggccgattgtatccacttcgttttaagaaacagctttcaggctatttcccgggaaacggatataaccgcttctgccggcataagaaaaaaaccctccgcgccggcagagggatcctttttatttagagatatcgacgaagccttcaccaaagacatcacgcacatcatgaacaatgacaaacgcttttgtatcacagcttttaataatttttttgagcatggaaagctcttgtttctggatgacgatatataaaatttccttcgactgccccgtgtaatttcctttacccgacagcagcgtaacccctctgtccatcagcgtgttgacctgttcagcgatttcgtgcttatgctcagatataattgtcaccgcttttttcgtattcaggccttcaatgataaagtccatcaccttcgttccgatgtacagcataacaatggtaaacatcattttttccgcaccgatgatgaaataagaactgaagacgacaatcagatcaaagaacaaaagcgcatagctgatattccaatcgagatatttgttcgcaatcctcgccaaaatggcagaacccgcagtcgtgccaccgactcgaataatgatcccgattccgacaccggcaaacacacccgcaaaaatagtattaataatgagttcatgtgaaggcgagtgccaatcatgcgtcagatgcagaaacagtgagttggcgacaacggtaatgatcgtataaagcgttgtttttccgtctaaaaatttatatccgataatcaataaaatcccgttcaaaatgatattcgtcaccccgggcgaccattcaaacacatagtacaagatcagggtgattcccgttaccccgccctctccaagatcattcggaatggcgaataaattaacggccaaagcaaagataaaagctccaataatcagcatcagcacatccagcaatctctttttcatcccagacactcccttttttataaaatcaaaaaagcccgggagagcactcttcattaaaagagcagaaactcccgggcttttatcccaacgtgtcacagcaggaacctgctgtgtgttttctctcggtccagaccaattcagcattgcggaaccctagaaaaccactgttttttatgttcagtttttatattatctttcaagattatacgggaaatcacgaacatgttcaaccactcttttttcattaaacctatggaaaatgcgaacgatctgccgatactaaaaaggaccttaaaatacatgactaaaaaatcattaaaatactttttttctcaaaatattattgactataggttattttacaggcattatagtatgtagtttttaagaaatagtttacataggaggaaatattatggcaggcaacctggtgtcttgtaaggcatgcggcaaagaaatcgctaaaggcgttaaaaaatgcccaaactgcggtaaagatcagagaaactttttcatgagacataaaatcatcacattgcttctggcagtggtggttattatcattctcgtaaacatcggcggcggaggcggttcttcgtcatctaaaactgcgtcttcaaaagctgcggaatctaaagaaaaactgtataacatcggtgacactgttaagactgagaaaactgaagttactgttacgaaagtggaaaaaagagattcagtaggctctcaatttgtcgagaaaaaagcgtctgacggcggcgttatcgtagctgttcaatacacggttaaaaatgtttcaaacaagccgttaagctctttctccattccaagagcgaaattagtagattctaaaggaacatcttatgattcagatattgatgcttcttcaagctatgcaacagaaacaaaagtagacaacagtaaaattttaagtgacttgaacccgaacattaaagtgactgacgtaaaagcttttgaagtggataaaaacgcatactctaaaggcacttggaaattaaagttcagcaacgatgttgaagtgaaaattaaataatcatcataacaaaagagaccctcatcatttgaaggtctctttctttttacaccttttggtacccgttcacattggaggactgccacttccaagagtcggcgcacatttcttcaagcccgcgctttgcttcccagcctaattcagccttcgcttttgccgggtctgcgaagcatgcggcgatgtctcccgggcgccggtcggcaaaacggtacggcacttcttttcctgatactttttcaaacgccttgaccatctccagaacgctgtagcctcttcctgtgccgagattataggcgtcggcgcccgttgtgttcagcaccttttcgagcgctttgacatggccctcggcaaggtcaacgacatggatgtaatcccgcacgccggtgccgtcctttgtcggataatcattgccgaacacctgcaatcgctcaagcttgcccacagcgacttgtgcgacgtacggcattaaattattcgggatgccgttcgggtcttctccgatccggccgctcgggtgcgcgccgaacggattaaagtagcggagcagcgcaatgctccattcagagtccgcattatgcagatcgcgtaaaatctgttccagcatcagctttgtctgcccgtaaggattggtggcgcttaaaggaaaatcctcagtgatcggcgttgtttccggaacgccgtaaaccgtcgctgaagaactgaagacgatttttttcacaccgtgtgcctgcatggcttcacataaaataaacgttcccgtcagattattatgataataacggagcggaacagccacagactcaccgacggcttttaatcccgcaaaatgaatgacggcttcaatctcattttcagcaaacacccggtgaacggcggcacggtcaaggagatccgcttcataaaacacaagcccttttccggtaatgtctttcacacgctccaatgcttccggtgaactgtttgacagattatccagaaccacgatgtcatagccgccgtttaacagctcgacacatgtgtggcttccgatataacccgctccgcctgtcactaaaatcgccatgaagaaagcctcccctattgaatgaattgaccatattatatcggttttttcttcctcaatcatccatttccaaaaagtttaatcgtttagtcatcgtttcttcataatttattttcattcgcgtaaaaaacagagccctcgattcaaacgggttgtgaaatagaaatccctcccccgcgcatggtaagataagacaaaggagatgacggtatgaaaaatgaaatcattgaacgctttacctcttacgtaaaagtcgatacacagtctgacgaaaacaatgaaaactgcccttcaacccccggccagctgacattggccaacatgctggcagatgaattaaagtcgatcggcatgacagaaattacagtcgatgacaacgggtacgtcatggcgactctgccggcgaatacggataaagacgtgccgactgtcggttttctggctcacgtggataccgcgaccgattttaccggaaaaaatgtgaatcctcagattattgaaagctacgacgggcatgatatcgttctgaatgacaaactcaatgtcgtcctgtcgcctgagcaattcccggaactttcccgctataaaggccagacgctgattacaacagacggcacgacgctgctcggagccgacaacaaagcgggcattgccgaaatcatgacggcaatggcgtacttgatcaaacatccggacatcaagcacggaacgatccgggtcgcgttcacgcctgatgaagaaatcggcagaggccctcacaaattcgatgtcggccgcttcaacgccgcgttcgcctacacgatagacggaggccccctcggcgaactgcaatatgaaagctttaacgcagccgccgcaaagcttacttgttacggaaaaagcgtccacccgggaacggcgaaaaacaaaatggtcaacgcttcaaaaatcgcgatggaatttcatcacgcgctgccgaaagaagaagcgccggaatatacggaagggtatgaaggcttctatcatttactttccatggacggagacgtttctgaagccgccctgtcgtacatcatcagagattttgacagagaccgcttcgcagaacgaaaagaatatatgcagaaaaccgccgatgcgctggcggccaaatacggcaaggaaagcatcaagcttgaactgcgtgatcaatattacaacatgagagaaaaaatcgaaccggtcaaagagatagtcgatgtcgcgtatcaagccatgaaaaacctcgacatcgaaccgattatcgaaccgatccggggcggaaccgacggctcacagctctcttacatgggactgccgacaccgaacattttcacgggcggccaaaacttccacggaaaatatgaatacatttccgtcgatcatatggaaaaggcggtaaacgtcattgttgaaatcgccaggctctttgaagagcgcgcttaaaaccaaagcccctgctttggtttttttctttcacatgaaacctttccttctttctttccgtatataaggtatgaaatggaaagaaggagtgaagactatggcaagagggactgtagcgaaagaattgaaaaaaaccttaaaagacccgcgtgtactggagacaaaatcaaacccttttaaaaaactgcggaaaatgttcaaacgatttttttaagataacatctcgttttctttaaaaaaataaagaaagcgctgtcaactcgcagtcatctgttagaagcagttattttgcatatcataaggttttttagggtactgaataacacaaggcaaacgaaaacaccgaagtagttaattagacacttacaaaaaatagtaataaagttatataaacgatcatcattcatcagccgatacaatctatagaaccacaacaagagcaaaatttcttcaacccatagttatttttacggaaaatgacgttattttttaaaaaagtgacaattgtttgaatacttttcgtttgttttttcgtacaataataataccaaaactttttttgggaggtatgtaaaatgatgctacttattttcgctgctttgacagggtatcttgttttctctttcagtaaggacaaccgccggaaaacgccaaagacaagcccgctggtgacagctgccgacacgaataacatcattgatttaaatgcgatccgtcaaaaacgccggatgccgctatcataaaaacgacagctgccgcaaaatcggcagcctttttttatgcacccggccgatatgaaaccttccgcctccttttttcgtaaaacataaaaaaggagtttttttatgtaccatttttacatcaaagagcgaatgtttacgtttaagaatcgttttcaagtgtttcttgaaagcggaaaagaagtctacaatgttgaaggaaagctgttttcattcggtgatgaactgaagctgactgatttggacggccgcacgctcgccagcgtcaatcagaaactgatgtcgctcgttccccgttacgagatttccgtcagcggcaaacccgtctgccaagtcatcaagaaagtcacgtttttcaaaccgaaatttgaaatttccggactcggctggaatcttaccggcgatgtgtggggccggaattttcaagtgacagacggaaaatcaaaccggatgaccgtcaccaaatcatggatgagctggggcgattcctatcatttgcagattgaaaaggaagaggatattgctctttgtcttgcgatcgccatcgtgatagatatgattctatttgagggtgacaaataaaaatatttatcgaaatatattgacaatatgagaaaacatactaagattaagagtattacagtttattctgaaaaatagcatatttccttatcaagagaggtggagggactggccctatgatacccggcaaccgctgttcagcagaatggtgctaaatcctgaagataaggttgagatttgcggacgcaagctcttccctatccgagggaagagtttttttatatttcatttcatcaggaaagaaggaatcgttcatgtcacagcaaaacacagaacaaccattgcatactcttctaagaaaaaacccgccgtttcgcgcggatcaggtcggaagtctgctgcggccggcggctgtgaagcaagcccgcctgcaaagagcggcgggtgagatttcggcagaacagctgcgcgaaatcgaaaacagagaaatcatccgcagcgtggaaaagcagaaagaaaccggcctcaatgtcgtgactgacggcgaattccgccgtgcctggtggcattttgattttctcgaaaatttagacggggttgaggcatttacgcctgaaagcggcattcagtttcacaacgtacagacgaaagcgcgcggcattaaagtaacgggagatattgatttttctcagcatccgatgctcgaagattataaattcctgcacagcattgccggcgatgctgttccgaaaatgaccatcccaagtccgaatatgctgtttttccgcggaaaattggaaaaagcggcctaccagaatgattacaaacaatttcagcacgatgtgtcaaaagcgtataaaaaagcgattcaggctttctatgacgccgggtgccgctaccttcagcttgatgacaccgcatgggccgttttcttatctgaagcggggcttcgtcagattgaagatttcggcacaacgccggatgagctgcgcaagctgtttgccgcttccattaatgacgcgatcaaggaccgccctgacgatctgaaggttacgatgcatatctgccgcggcaacttccaatccacatggacggctgaaggcggctatgatgcagcggctgaaacgatttttgacgggcttgaccttgacggattgttcctggaatatgatgattcccgctccggcggctttgaaccgctccgctatgtcaaacgctctgatcttcagcttgtgcttggattgattacatcaaaacatggcgaacttgaagacaaggacgcgattaaacgccggattgaagaagcttcacaatatgtcagcctggatcagctttgcctcagcccgcaatgcggattcgcctccactgaggaaggaaacctgatcacagaagaacagcaatgggcgaaactgcgtcatgtcgtcaacattgccggtgaagtctggaaataaaaaaaagacacgcgatcagcgtgtcttttctgtttacagaggaccggttccgattaaaatatcgatatctatcgtaatatccgccgcttttcggctgataaaccgccggatgctttcatcagtacatttccatgttaagggcgtcattttcacaagccgctcaaggtcaggctgcgataaggtcttcgtgtaacacagccgtttgcgctcaaaggtttgaaagcccgcttggaatcgtccggccgcagaatcggcggtgtcattccgccgaggactgtctccgaagaagaattcccttacttccttcaaataatcacgccgcggcaccgctttaatgactgtgccgccctttcgtaaaagcctgctgcattccttgtaattccaaggtgataaaacagacatcacgacatcaaaacagctgtcggcaaacggcgcatccgccacatcagcgacggcaaaaaccaaatgatccccgaaggcctttgcggcatgcagcacaccttctttcgagagatcaatgccgattcccgtcacggaaaaagcgggctgaagcaatttgcatacggcggctaaatgagtgccttctccgcatcccgcatccaatatcgccgccgttgtttgcggagattgaatgcggctgatgatggcggcgatctccttttgaaccggcccaaaaaattcccggctgtcaaaaagagcgcgtctcgcttcgaacagctgcctgtcatagcgggttttgaccgatttattgaggaaattcacatatccttgctttgatatatcaaatgtatgcccgtgtccgcacatcaagcttttgtattgtgagaccgccatggccgaactgcatagcggacacctgaatacggactggcatgattgcagtaattccgcgcgttttctttttatagacgtcaataaaaacacctcattcattcgttattccgatgaaatgaaaaaggcatagacaaataaacctcgcaaaattggaagtttaacctatttatctatacctctcattatctgtaacgaatgaactgaatgatcatgaaaatgaccccttttctgccgtcttttgaaggcggtgccctcagatccattttatcagctgcatcccgtctttacaatgaaccggaactgtttttcgggggctttttatacctttttaatccaattacttgtgaacatcctttattttctttatttataatataaatttattattttgaaaatatctaaaaaggttgattttcaaaaattgaaacgataaaatactgctatctcatgtaatatcgttattcttgtatatgatcagtaatatggtctgattgtttctacctagtgccgtaaaagactagactacaagaaagtttgcataaatttgaacgagtgaaaagcatatgatgctctcagtctattcttttcttttggctcttatttatcacactttctggctttcaggaatttgtgacgaataagagctttttttatttccataatacccttataggagttgctcacatgtactttttattgaacattgtcggtctcattgttgtcatggctgttgttttcttatgttctcccaacaagaagaagattaaatggcgtccgattgtcatgctcctcgtctttgagtttctgattacttggtttatgttagggacaaaagtcggcggctttgtcatcgggaagatcggcgcgttctttacatggctgatttcctgcgccagtcaaggaattgcgttcgcttttccgtctatcatggccaatccgacggttgattttttcttcagcgcattgctgccgattatcttcgtcgtgaccttctttgatatgctgtcgtatttcggtattctgccgtggctcattgataaaatcggctggctgatttctaaaatatcccgtctgccgaagctggagagctttttctccatccagatgatgtttttaggaaatacggaagctttagccgtcatccgccagcagcttgccgccgtcagcaacaatcggcttctgacattcgggctgatgagcatgagcagcatcagcggttcgatcatcggatcgtacttgacgatggttccgtccacttatgtgtttacagctatcccgctgaattgcttaaacgcgcttttaatcgccaatatgctgaatcccgtggacgtttctaaagaggatgatattatttacgttccttcaaaagcggagaaaaaagacttcttctccacgatttctaacagtatgcttgtcggcatgaacatggtcattgttattttagcgatggtaatcggatatgtggcgttaacggctgcgttaaacggcgtactcggactgttcatgcacggtttgaccattcaaaagattttctcatacatcttcagtccgtttgccttccttctcggattaggcgtacatgacgcgatgtatgtcgcacagctgatgggcatcaagctcgcgacgaatgaatttgtggcaatggccgatctgaaagggcagctgaaatcacttccgccgcacacgattgccgtggctacgacattcctgacatcattcgcaaacttcagcaccatcggtatgatctacggatcttatcaatctctgcttgatggtgaaaagtcagccatcatcggaaaaaacgtctggaagctgcttgtcagcggaattgccgtttccttattgagcgcggcgattgtcggattgtttgtctggtaaaataaaaaaagcgataccgctccgttttagagtgatatcgcttttttttattgatagacggatgcaggcacgaaaacgtcccggattcctgccgcgtatggtccgagatcatattgtccaaacacaacggcaatgccgtttttcgtaaagaagaaaggtctttcgttattcaggatgatctcttgttttttgacgtcctggtcaaacagatcgtcatgtttcttgatgtagccgtaaagatagtctctcgttttgttggctttcgtttttgtattgagcacatcattgagtgtgacccgtttttttgcggccaggtcgtaattaaaggtctgaacggctgtcagcccgtgtgcgccgcctgtgtaactgtagttttccgtctgaatgctgagcttgccgccttgattatacttcaccttgaaatctgcctggtattccgctttgtagccttgtttttcaccgtcttttttgttttttacatattcttggtacgagttttcaatatagcgtttgaagtcctgattgattttcttttcaaaagatgcgtttcccgtatttgtgacctcggggtacgtcagctgctttacatgcttatacgtctggcttttgacgacgggctttgcagtttgcgcggcctcggctgaaggcgcgaaacctccgaacggcgcggctgtcagcacggttaagagcacggccgccatcattttgaatgcctttttcatcacaactcctccttttcattaccgttccctttttgaaaacggattacactctatagacagcgcagatcagcaaattgtttctgggccttctttcacattttctccatgaaaaaaagagacatggataatccacgcctcttttaccgtgaaggtctttgcgcaatggcttcataaacggcttccgccaaatcggagttgccgaacatctccaaaacgccgatgacggtttgatcaggaatcggttctgattcctccttcggcacgacaagctcttcagccgtttttcgcagctcttcgtttaaaggctgtccggggtaagctttgctgtaaatggccatcggatcaaggtcatgattgacgcaccattgggcaaacaccaaaatcatcatgttttcgtcacgccggtaatattcttcaagttgtttttcggtaaacggcttcactatcaatcgctcctccagaaaatctacccctaagatacacaaacacagggcggaagtaaaccaaagagggtgaaactattatttcatcaacccgcctgctttaaatagcgcatgccctgactctctaaaactgttgtctgaatgtccaggacagcggaagatacggatttgtacggaagcaattttcgttttctcccaatattctttcacaagaaaaaagcgcccctctcatcaaaggcgctttttcattcttatacgtttctgtcccaatgccgatgctcagccacggctttcagaaattgttcatggtttccgtccggaacaagaccggggccgctttcggttccggcggcgagggcgagaagttcttttccttcaccggaggcgccgatcgctttgtaatggctgaaagcttcgttgacgaagtctctggccgatttttgggctttgaggctgtctgtgctttgttttccgcccggaatgaaaacagcgtcgtacaggacggaatccgctgtcaggaacgtggctgacgcttcgagctccgtgccgttttctcccttaacggttccaagcacaggactgatgatatcggctctgactcccgcctgtttgcatgcgtcaagcacttgtttgactttctcatcagaaaacccgtggtcggttaaaaccgcaacctgccttgtcgctgccgtcttcaccgtgttttcctggcttaaggccggggaagtgaacgtttcatcagattcacggtccttcggcggcgggttcacgccgattcctttcgcaacacgctcggcaagcccggcgtcgacgtgactgaagacatcaaccacctgctgctgcacatccttgctgttcacttttccgacttcaaaacagaacgcggagatgatatgttctttctcggcgggagacatgctgttccagaacatcttggcctgagaaaaatagtcattgaagctctcactgcgctggcggatttttctgccttctactttttcctggtaatgaacgtatccgccttcttcttctgaggccggcgacggatcattgttctgcagggaatttttatgataggcgacagggcccttattaatcgtcatccggtggtagccgtcgtattggttgttatggaacgggcagaccggccgattgatcggaatctcgtgaaaattcggcccgccaagacggatgagctgtgtatctgtataagagaaaagccggccttgaagaagcggatcattggtgaaatcaatgcccggcacgacatttcccgggtgaaaggcgacctgttccgtttccgcaaagacattgtcctgattgcggtcgagggtcatttttccgatcagcttgacgggaaccaactcctccggccacagcttcgtcggatcaaggatatcgaaatcaaatttaaattcatcttcttcgtcaatcatctgaacaccgagctcatactcgactttgccgccgttttcaatcgtttcccataggtcgcggcggttgaaatcgggatctttcccggcaattttctgcgcttcatcccatacgagggaatgaacgccgagcacgggtttccagtggaatttaacaaagcgcgcttttcctttctcgttgacgaaacggaacgtatgcacgccgaagccctccatcatccgatagcttcgagggatgccgcggtcagacatcgtccacatgaccatgtgcgcggattcaggattgtttgcgacaaaatcccagaacgtatcatgagccgtcgcagcctgcggcatttcattgtgcggttccggttttatggcgtgaacgagatccgggaatttgatcgcgtcctgaatgaagaacaccggaatattgtttccgacgaggtcatagttcccttcttcagtataaaacttcgtcgcaaatcccctggcgtcacggacggtgtcagctgaccccttggagcccgccactgttgagaaacggacgaaaacaggtgttttgacggacgggtcctgcaaaaatttcgcccgtgtatattccgtcatcggttcgtacacctgaaaatgcccatgaacgccgtacccgcgtgcatgaacaacccgttccggaatccgctcgtggtcaaagtgcgtcattttttcacgaaaatgaaaatcctccatcagcgtggggccgcggacgcccgcttttaaggaatgctcatcctcagacacgcgaagcccctgattggtcgtcatttttttgccgctgttatcagatcggtactgctccagctgttcgtcctttgagtgttcatttactcgtttgttttgatcatcactcatgtcagttcccccttttaaaacgaaacattctacagcacatttacccgcggcgttctttaaataaactgctgatccgctcattaggattttaggtctgtatttacatatgcggtcatacacattttgaaataagccattttcacagaaacaaaatgtgaaagcgcttaccaaaacagctgttgaacaggggaggtcatatcatgcttgccatactcggttttgtgatgatgattgtttttatgtaccttattatgtctaaccggctttccgcacttattgctttgattgtcgttcctgttgtgtttgccctgatcagcggatttggcaaagatctcggcgggatgatgattcagggtgttacagacctcgctcctaccgggattatgctgttattcgccatcctgtatttcggcattatgatcgactcaggcctgtttgatcctctcattgccaaaatcttatcgtttgtcaaaggagacccgttaaaaatcgccgtaggcacagcggttctgacgatgaccatttcgctggacggagatgggacaacaacgtatatgattacgattgcggcaatgctgcccctttacaaacggctcggcatgaaccgtttggtgctggcggggattgcgatgctcggttcgggcgtcatgaatattattccgtggggcggaccgacggcgagggttttggcttccttgaaattggacacgtcagaagtttttacgccgctgattcccgctatgatcgccggcgttctctgggtgatcgccgttgcttatctccttggaaaaaaagaacggaagcgtctcggcatcatttcgattgaacacgcgccgtcttctgatccggaggcggcgccgctgaagcgtcccgctctccagtggtttaacctgctgctgactgtcgctctgatggccgcgctgatcaccagcctgcttcccatccctgttctttttatgatcgcgttcgccatcgccttgatgattaactatccaaatgtcaaagagcagcagaaacggatttcggcgcatgcgggtaatgcgttaaacgttgtctcaatggtgtttgcggcaggcatatttacaggcattctctcaggcacaaaaatggtcgatgcgatggcgcattctctcgtttccctcatccctgatgccatgggtccgcatctgccgttgatcacggcgattgccagcatgcctttcacctttttcatgtcgaatgacgccttttacttcggtgttcttcccatcatcgccgaagccgcttccgcttacggaatagacgccgctgaaatcggaagagcctccttgctgggacagccggtgcatctgctcagcccgcttgtgccatccacctatctattggtcggaatggcaggcgtcagctttggcgaccatcaaaaattcactattaaatgggccgtgggaacaacgattgtgatgacgattgcggcgcttttgattgggattatttcgttttaattaaaaaaggatttccgctggcggaaatccttttctgtacattatttttttgtatagcgcacccagtcataatgagcgtatagcggatttacaccattgtaggaaccgagccagtcatcgacacctatcccattccacaagttcatcatgatctttcccggtgttgtcgggatttggcttgtcgcagtatgttttaattgcccatcgacataccattttatagagttcggctgccaatcgaacgcatacgtatgataggcattggccgcgtcaaatccgagatccgcaaccttctcatggtttcccgcgccatttgtataataattaaattgaacctttgtcgtgtcttttcctaaaaattcgatatcaatctcatcccaaggggtaccatccgttggacctgtataagtgaagaacgatgaaacgatccccgtgtttttagccggtttcattctgacttcataaagtccatagccataggtttgagcggagcggttctccccgcagtcaaacttgttataagacgggcttgtcagcgccaaacgcatttcacctgatgacgtcacggatacattatttgcacgccaagtgcagttgaacatatctccattggagtaaccatttgctttttgccagaaaccggagttatagctgttaaaaggttcaaaaaacgatccgcctgtttgagctgatgcagcagaagtgatcgcacacaaactcaaaaacaatccagtgacaagaatgagcagcactcgtttcatacgataaaacatgtcggcattcccctttctttgagagcgatttctttatcgatcatacatgattctgttaaaagggaacatcggtcagaataatgataataacgaatcttaaaaaaacctaaattaccatcagcacaaacagaaatgatccgcgctcattgtaatttaggttttgcatgcttatcagcaacaatcctaacaagatcatatgtgaatgtaagaaaaaatgaatccaagaacaataatgccaacgctttcattatgcttgtttgactaccctttctatgtgaatcgttaaatacagcagctcgtcactggtgagcttgtgctcatacgccctctcaatgcaagtttggattttcttcgtgcattcatacgcccgacggtatttttctccagcaaaaagtcgatgtgtgccgttaaaaagacgctgcgcgaaaaactttaagtgggtgacaaaccgataatagtgaagcgattcttcgttgaattcaatcttaaaatggtattttacgatactcaaaatctcttgcatgacttttgtaatgctgatgatattgggcatctcctcattcagctcggcatttacaatatgcagcgcaataaaacctgcttcatcctccggcagagacacgccagtcttgttttttaccatgatcagcgattcttttccgattgcaaattcgtctttgtagagccgcttcgtttcccacagcaaggcgttttgatatccagccctttcttattgcgctgaatggcaaagtaatatggtcggtcagcgacacatagatgctgtcgttgagctttttgccaagctgtaatttcgcatagctgataatctcctcggatactttcatacactcgatcggaatatcatacaaaagggttttgaacttcggatacatctttgttatcgagggtgagcactttctcaatgcgggcttcatctgccggatctcccgttttcttttgaaaagcaatgccccggcccatgatgaccaattcctgattgccttctttgagcacactgacgacattattattattgactttcgcaatcttcaattccgtctccctcccgcctgaccatttacctgctacaccttgattgtacatcctttttgtaccaggtcaatatctccaggtcaatcagaaaacgccgttcagaaatcattgtccaacgatgaggcagaggcgcatataatgcagagaaccggtttttgggaaggagcgtgtgtgatgaaacggttttcgaaagaagaaagcagctggatgctgtatgattgggccaattcagcttattcggtcattattatgacggcggtgttccccttgttttttaaagcggcggcggcggaaaacggcgtcagcgcagctgattccaccgcttatttgggctatacgattgccgccgcgacttttattttggcgatgctcagccccgtcttaggaacgattgccgactacaaaggatgcaagaaacggttttttgccttcttttttctgatcggtgtggcgggcaccgccgcgctggctttgattcccggcgaatcttggatgctgttattaatttgttatacgatttccacgatcggctttgccggatctaatgtgttttatgatgcgtttctcgttgatgtggccgcaaaggagcggatgaatatggtgtccgccagggggtttgggctgggctatatcggcagtacaatcccttttctcctgagcattgccgtgattctgtcagcacaagcggaggtgattccgctgtccgcccagactgcgggccgcattgcctttttaattacggcggcatggtggggactgttttcgattccgctccttctccgcgtccgccagcgctattatatcgagagggagccgcggcttgtgatcagcagttttatacggctggccggcacgctgaagcagatcaggaagcaccgggcgctgtttttgtttctgctcgcctatttcttctatatcgacggggtcggcaccatcattacaatgtccacgtcatacggggctgacctcggcatcagcgcggcaaatctgctgattgttttatttgtcacacaggtcgtcgccgcccctttttcgattttgtacgagcggctggccgaacggtttaaaggaaaaacaatgctttatgccggaatcggcgtgtatatgattgtctgcacgtatgcttattttatggattccgcttttgatttctgggttttggctatgcttgtcgccacttcccaaggaggtattcaggcgctgagccgctcttactttgcaaagcttgtccccaaacagaacgccaatgagtttttcggattttataatatcttcggcaagttcgcttcgattatcggcccgcttttgattgccgtcaccgcccagctgaccggaaattcgtcagccgccgtgttcagcctgattttgttatttgtgatcggcattgccatccttgcgtttgtgcctgaggaaacggcgtaaaaaaagcctgcacgcggcaggctttctattttatttcttggctttatggactttcagttttttgcctttgaccgtcgtatttttcatgatgtcaagaacgtgcgggccttttccgttcagaatttcgacgtatgttgcgttgtccagaatcgtgataatcccgatatcatcggctgaaacgccgtcgattttcgcgatcgtcccgacaaaatcgaccgctctgagtttcttctttttcccgccgttaaagtacagtttcatgatgtctttgtttaactgttcgcttttgtctgttttgacatcggggcgggcgttcaatttttccgcaaaagccgctttccgttccgctgtttctttctcggacggcgcctcccgcttttggatgcggaaaccgatatatgtctcaatgtcattcagaaaccgcgattcagccggcgtcacaaacgtaacggcccgtccgcggtgtccggcgcggcccgttctgcctgtgcggtgcacatagctttctttttcaagcggaatatcataattgatgacgaggctgatgttttcgatatcaattcctctggcggcaacgtcggtcgcaatgagatagcggaactcgccgcgcttgaattcattcatgacgtcaaagcggtcttcctgcaccatgccgccgtgaattttatcacaagggtagcccagcctgtccagctcatcggttaactggatgaccctttcttttgtccggcagaatatgatgcagctgtccgggttttcggtgatcaggacatcacgcagcaaagatgatttatcctcttcttctgttctggtgacaaaatgctcaatgtcttttgtcgtcaggccttccgcttttacttcaatcaattcagggtctttcatatatgtgcggctcagcttctcgacgtcatccggcagcgtcgctgaaaacaacatggtgactctgtttttcggcagatgctgaatgatggcttccacctgttcaataaatcccatattcagcatttcatccgcttcgtcaatcaccacatacgccagccgttcaagcggcagcgtccctttttctatgtgatcaagcacacgtcccggcgttccggcaacgacgtggcttttttgcttcagttcggttttctgtttgtcaaaagaagcttttccgaaaaccgccgtggcttttatccgtttgaaacggccgatattcgtgatatcttctttaatctgcgccgcaagctcgcgggtcggcgttaaaatcagggcctgcggtttgttttcctcccactccgcaagctcgcagatcggaatgccgaaagccgcggttttgccgctgcccgtctgcgatttgacgacgaggtcttttttttgcagcgcggcggggatgacgcgccgctgcacttcagtcggctcggtgtattgcaagccattcagcgcccgtcggatctcggggctgatcgcatattcattaaactcattcatgactaaactccttctctgtccggctcccctcattatacgcgaaatgccgccgctttaccctgacgttttgccgggccgttcgggggactgctttttcttcatgtcgagcacgacccatttggcgcaataaaagctcatacttccttccccgtcatcgacatagtagcggatcgattcccagccgccgtcgactgggctgatatccagatggatgtcggtgatgctttcaagatcatccagccgggcagacctcacatcctcaaaccgcagcacggcatcatactgtccgtcagtcagcttcagctcaaacaccgggattttatcataatactcgttatacccggtatagaacgtaaactccgtcaattcaaaacaacccggcgaacctggccccggcagaactgctttctcatgtttgtgccattccattttgcgcctcctttttttcagctgaattgacatgtctgactcaaatgaatttttttcttacaaatccccatgaacttctttatattcctgcacccaatctcttaattcttctatcgtatgcagatacgcatcaggcgaatctttcagatcaaacccgctcaaatatacgagcatctcccaaacggtttcgtcctcatccgccggatcacctgcactcacatactcagacgcccaatccgacacttcttccctcgccgcttgaccgttcaggatcagaccagcctttttcagacattctgctcttgtgggttctttcacgtcaaaatcctgcctttcatttcttgtttaaaatgctgactaacagcctcctggcccgttcgtgccgcccgatttcctggctgagctccggataatccatcaaagcgtttttcagctgcgcatattgcggatacagctcaaaaaaggatttatataaggctttacgctgccgtgcaggcatttgtttattcgccaaaacaaaatctaagctgccgcagacaagtgcgaagtattcataaaaatccccagcgcaggcagcaccctcaaagtcttcttcgaatctccctgcatctgaaggcagcggcccctctaattcttttttgtgtaatttcaagcttctgatgacgtcattatttaaagaatatctgttggatcttaacatctcatttagccgctttcccattactgatatcccgcttataaatccctgaattcgagaccgcgtaaatggcatcgccagtcagcttcagctgatgcccggaaagctcatcgccatccgcatcacagcacgttatctcttgcatcggcagactgacatcggccggaatgagagacagtgaatgatcatctttgcatacccaaaacccgttatctgaaatcgctagctggtcgtaaaccccggaatatgctttatcagaaataatccacactcgtttcacgtcggtttcttcaaacgcagcaatgactgtataagcgtaatacagcatgtagattagtccgtctttttctgcaagtgcataacagtcatctaccgcgggcgcatatatttctgaaagctgctgatcaatgtgggttttctttagctgcccgtctaaagtgaagcacagcacactgtgcccttcaggattttcatcactataaataccttcatcacttaaaccgatccacaggttttgtttttcatccaaaagactgcatgaaacccctgaagggagagaaaatgcactttgttctgttccttctgctgaaaatactttcactttatactcatgcgattcaaagaaaatcaacacataccagtcagccgaactctgttggaacagcataatatcctcatacgggatttgttcatcgatatgaatcactcgcgtatcgcccgatttgtcgatgatcgtaaacgaaagcccgccattctgatgccgtccgagatacagacgcccgcagttatcaaaatgacaaaaacatccttttactgattcttcgactatcttattcatttttattttcatgtcattgccccttgagtcttggatggtatcctatttatatcgatcgttcactccgtaaaatgatatgcagatggctgtaaaaagccatctgcataggattgatcaatactttaccagatataaatcgttatcactaaagataaacatgcgatcctgtacggctctgtacgttgtttctccttttctatcaataccgtgtatcatgacgtcagtctctttgtgctcttcatgaaatgcaaatagggtatcatcgtgactctgaatcagcagcaccctttttttcgaaacggatagctgatcacaataggagtattgatcgccgtccagcacatattctgcaacagtacgaattctgtcccgtccaatctgataatgcccgatgacacagcaatcctctccctcgaaacatacatacaaatcagatttgatcgattgtacggcatagcattcgtgcatcatttctttaaaatcgtcttcaaaataaaacgttctgtcttctgcatgaaaagcaaatatcgcttttccttgaggatttctctcatcatacataccctcgtccgttaatccgatccataataatccatcctcacccagatgaaatacattggcgcttaatagaaaagaacaaatcggattgattttattactgtttacgcagtatgcagccaattgacacgtatgattctccaggtaaacgatcacgatagtgtcatcatacgaatcaatcagatagaaatgggcatcttcagaaaatccgtgtaactcttttttgattaaaagagagctgcctttcataacctccaatattactttgtgatcgtgcaccgacacaataaatacttgatcatcccgacccgcattgaaataaatgatattttccctttcatatgacccaacacgctccgcggtaagttttaacatcagcaacactccgttgaataggaacctgaaatttatattaaattaatcaatgatatataaatctgctgcatcgtattcaaaccaaatgattttttcattactttcagtagttacatcaaccttttgagtgttcaggttcatgcaggacttatttttggcagggtttgctattataacaacaaaatcattgatcgatgctaaaaaatataattcatctaataagtaatctgccatcaattcttctttggttaggacacattcaatatgaatgaactttttcgatacagtattcatatttatcattttcttttcaaccttcttcttccattcttcaataaaagaagggaatgccattacttctattagagctgtttcgaactctaagtcattcattaatttgagaaaaagtatctttactcactagatcacatgaataaatcgaattgtatttaagcggattaatcacatccagattccctatagccctcaatgattctttttgtaaatttaaaggagtgttcatgtttgcctccgcgaacgatttcgttatgtaagaaaagagaggctgggaacctctcttatttgtttatttatgatttcggatgatacgcataaaatgattggtcgtcaaagcgaactgtttcagcttctacagcaatcagcattctgttcatgtcaatgagaaaattagcatttgattgatactccggaattacagcatttgatagattaccgattccttccgggtggtaactcatctcaaatacttgccaattgtattcttccgaatctattttttctaatctcatatcaccaatatctgcactaaaataaacagatgctgcatttttaacaacctgaaccttaaaacaggtcttttttaaagaactgataatcgacctttaaaatattacatccctcgtcaatataatctactctattgttcaatttgtttgtgcattgtcttctccttctcctaactaacactaacaaacccattgatagaagtgtcttgatgataaacatagattattcaaacaagccccaaaaatatattactctgcatatttgtcattaaatatctgttgaatgcaaaaatactatctggagattatttgaaatcccgtttagaacaatcagatgatatcggtagtaggtattaaaaatatacttatttgtaatgtgccgtaagtgttttttcaaattcaactggaaccgtctgatttgggaatacaactgatatccaatctaagacaacgccatctaacgatctccaagttgctagttcttttccttcactctgatgatcaatacctagaatacagatttcaagttctctctcaccataaatcgcccactttaaagtcggtgaagcccaaacaacacgagatgcaatattcattatacagtcacttttactgtgctttggataatcagttaagagtgacagatactcatctgcagttatatgcaaagggatctttatccagttaaaatactcaaattcttcgtagaattggtttatatgttcagaactgtctataacagccattaatataaactcatcatgatgttcattagccaaactcttaaacattccccaactttcttcagataatacccaatggaattcctcgaataaataataatttttcctttgcttaaaaacttgtttaggcaatgtttgatctacgtgacataaggaattaattatggattgatagacttttaactccttaggatgatcaataaaatagtgatccatcttatttcccctttaatgtcgcattctgattttgtgtgtgaatttttttctacctttaggtgtatattccgcggttggatagggacttgacttagcatgtttccttagggaatacttattcccatttttcgtcatagtgataacaccccatgatgaactgattttctccatccttgtcttcttaaatttttttcaaaagttcttctttttacattagtagaataatttttgaacctagaagtttttccagttatatccctataacttgagtaggcccttctagcccgtacactttttctagatagtttatatgttttagcagctttataaatccgattagcacccttaaataacttcccaggaccaaagttcgaagccgctgcccaggctgcacctctccatcctttacctgatttatatgccttatatccgtcataagccgcaaagccggcgttaatggctagccacacccaatgcccatctggatcaacattcatcaccgggttgttgtttccgtatgcatatccattctgatctaaagaatccccatcgctgcccgggtctgggtctagtgataagaatacaccgtttcttggttcgtagtagcgggccatgagatagtacaggccggtttcttcgtcgtattggtagcctgcgtagcggtagcggttgtcttttacttcgtcgcttgcttcggtttttgtcggatttccccacgcatcgtactgatatttggcaacggtttttccggtgctgtctgagatggcgatgacgtcgccgtgtgcgttgtagtgatagaaatatttcttgccgttctctgtataggataacagctggccgctgtcaccgtacgtatatgattttgtgacgttgttgtcggcgtctgtttcatacagaacgttcaagctgtctccgtcatagaagtagttcgtaacgtttccgttgacggttttttggattctgtttcctttttcatcgtatttgtatgttgcgaacggcttgtcttcgccttttttcgtgacggcggtcaggttgtcttccgcgtcccacgtatatgtgtatttgccgtcagatatgcggttgccgtttttatcataggacaggtcttcgtcattcaccttcgtcagctggttcatgatattgaatgatgcgttgactgatttgcttgcgccgtcctttgtggtggtgacgtttgtccggttgccgaagccgtcgtacgtatattgaatgacggtgccgtcttcatgagtttctttgacgagctggttgagcttgccgtattcgtactgcacctttccgccggctgagctgtcgatgaccgtgcggttgccgttggcgtcgtattcatagctttcccggaagatgctgccgccgtttttcgctccgatatgaagagagctgacaagattccgctcatcatatgagaagctcgtgccgacttcatttccgctgatgaatgtctggacattgccgttttcatcataatcaaatgtataggctgaagtgccgtctttcatttcaatcatttgatcaagtttgttgtacgtaaagctgtttgttcctttttggccgccgtggctccatgagaaagttttcagcttatctgaatcagccggatacgtccagctttggctgccgccgcggtcggttaattcggtcaggcggtttttgttgtcaaaggtgcgttttttcgttgtattttgttctttgtttgtgaccgacgtttcattgccgtttttgtcataggtaaagttgtatttttcagtgccgttatacgcttttgacttaacccggtcggtgccgtcataggtcagcgacacttcattgccgttggcggaaacggttttcgtcaggttgctgttggcgtcatattcactcttcagtacattgccgagcgggtcggttgttttgacgagcttgcccatgacgtcatattcatattgataggtctggtttgcgccggcccgaatcgtttttgtcagctcatttccttccttgtcatagctgtgaaggatggatgtgccgtttgacagggtcagctttgtcagctggtcggcctgatcgtattcgtaggcggttgtttcgcctttcgcgtcggtttcagacattttcttgccagtctcgtcatatgaagcagtgcttgcataacctagttcgtcttcttcttttgtgacgtagtttcctttttcgtcataggtgtttttcgtcaggatgcttccttcgattaatcggatgtcatcaaaccacgccgttcctgtggcgcttttttggaacagaatgctgatttcgattttattgatcggctttgttttcggaatgactgccgccgcccggttccattcctgtgtcccctgcgggaatttggcggtgtagacgcccgtcgtgccgtccgcataggtgacgccggcctgaagcgcgtaatcattgtcgttcgttaattttacgccgtctgccttggacatccctgtcagcgtgatatataccggcttatcgtccgcgctttggcctaatgtgacggtttgttttgcggccgcattggcttgtgatgcatttgtgcgggacgcttttaatgagctgtcatcatcgaagccttcatcaaggtcagcggcggctccgcttgtgctccagccatctgctttagccgtgaaactgctgttttgaaccgggttatagcttgaagagacttcgcctttttccagctgaacctgatcaaaccacgcttttcctttgccgtccttgtctttatgatccacttccatatagacgatggcttttcctgcattggccggtgttgtaaaggtaatctgccgtttcgtccagtcattctttccggctaatgcgcctgattcattgtgaatccattgaatgcgtttttggtctttgtcacgcagatcaatgttgaaatacgctctcgcctttgtcagatccgttttgatctggccgctgagtgtatacgtcgtattcggctcaagctgcacttcctgcgttgcggacgcatggccgtgctctgttccggctgaagcggattgtgaggtgatctccagtgctttttgtccggacagcgcgccgcttcttgcttttacagacgcgatgcttccgctgtctctcgtagcggtgagattccagcccagctttgttgcttcaaagctgccgtctttcagcaggcttgccgaagctgccagctctttgcttgattgaatgagatttccatacttgtcatacacggcggcggatgaggattttccgctttgatccgtctcagaaacagcatcaagtccgtcgtacgcaatatcagtgacgttcccctcggtatccttcattttcgttacgtcattgtttttgttgtactgatacgtttcggtgccgtagttgtcttttacggctgtgacgttgccgtctttatcatattgatagctttctgtcgctttgcccgcatccgcgtcgttcggatcggtgtcctgaatgacgttgttgccttcgtatacagtgttggtcgtgattttcagcccttcggcatcatcgatcatctgaatcgggttgcccgcctcgttatagccgtactgcactttgcggccgttcggctgcgtcatgagcagcgtttttttgccggcgtcatagctgtaatcatacgtttcttttttcgcattaacggctttggccaggcggtgcccgctgtattggtattcagtgaacagcggtttgtcatccgtgctgtttgcggaatactgcttgacgaggcgcccttcggcatcatagtcgtagcttgtgacgctgccgtcagtatccgtcacctttttgagaaggtctttgtcatatgaatacgaaatctttttgtttttcggccctgtaagagatgtgacatggccgttttcatcataggtaaatgtcagcttgcgccctgatgcgtctgttatggcggtcagctgattgctgtcgttatattcgtatacggttgtgttgttgtgtccgtcaacgactttttgaagcttgccgccttttttgctgaaataagcgttcgtctgatcctttgtttttaatacaaattggtcgcttgtttctgtcagttcgagataaacacccgtcggcggctgatacgtgccgtcagattttttcgtgaagacatgtgttgtcgcgtcctcatcaatataaacggctctgccgtcttcagaaagaatcgacatttccgcatcggcataccagccttggccgaacatatggtcagagctgtcaaggctgttaaaggtccgggagagtccgagcccggcccgcgtccgtcgattgacatatcttcttcattgacgatgacatttcccgtcgcgccgttcagctgtccgtccggaatgtcgataatagaccagaattcttccgttccgaggaattccgcaccttcatggaaaacagggttaaaaggtgccgtcggtatactgtcaccatttgcgtcataggcggtcagcgtaaaggaatagttcttcttccctttgtaattgccgtttgcgttttcgtaaacaggtgaagggtcaagcgccagttcgccgccctttccgtccgtgtgaagctggaattttcccgctttcacttcatcggctgacggccagatgtgtttgttttgggtcgtccaatgatcggtatccccgacatcgaatgattgatagtcttttccgttgtagatgttgattttgtagcctttggcgtttttgactttatcccatatgagattgacataacccgtttggctcgatttcgtgttcgtatagacgtagcctgtcagatttttcggctttgcgatatcaggcagcgccggactagcttccggtgaggcgatcgcttctccgtctttgttataggcgattactttaaatccgtatgttttccggtttgcgtctccgccggcatttttataaacggggcccgggttgatcggcaattccgcgccttttttgtctttcaggtgaagcgcatattttccggcgctgatttccgcctttgtcggccagatgttttgattttttgtggaccaggatgttttatttccgaggtcaagcgtttcaaagcttttgccgttaaagacttgcattttatacccggctgcgcctgatacggctttccaggaaagatcaaaccagcctgtggcgttgttgttattaaagcctttcgtgcttggtttctgaactctgccaatattcggaatgacgggcttggcggccgcagacatggcgccttctccctggtcaaacaccgcgctgaccgcgacccagtaatttttacttgccggatagctgccgccggagtttttatagaccggcgaaggattaagcgctaattcacttccgccttttccgtctgtatgcagcttatatttgccggagtcgatttctgcttttgtcggccagatgttttttccttttgtgctccaagaggttgcattgccgacagaaatggcttgatattctttcccgttataaagccacactttatagcttttggcgccttcagcttttttccagctgatattgaaaagtcctgtcgaatctccgttatgatacgctttgacagacggcgtgtccgccttcggaatcgtgtatgtcacttcaatgtatggttttttagcagagtttgctgatgacatcagcttcttccaatattcttttccgttgccgtttgtgtgaagcttaaagccgtaattggcgccgccgctgttccacgacttgactgcggatgtgacatcgaagcttgcccattggcctttatagacctcggctttgccgatgtttttggagcccggcttgtttttccacgtgatcttggcattgtcgtaattgctgtttacggtgtcgagccaaagccccgtcgcctttgatccgtaataggagtgggctgtgtatgctttaagcgtcgcttttgtcaccgtcatgtttttgatcggctttagattatcaaacttcataaatgcgtagttcgttccggttgtgccgtcataataacctgttttcagcacgtacgctttcaatccggcctcccatttctgcgacgcggcagagtagtttgtcgtcgggtacgcactcatgacaaaggtatcggatgacacggatactgatgtggaaggatcaatagataccggataaacccgcttgggatctttcagccatttttcatcggccgttacatgcagcaagtagccttcgctgtttttttcaagcttgaagctgacatcttctgacctgctgacctcacctgacttctcgtcgagatctgagtcggtcataaaaggcttcggcacggtgtagacgacattgtctttgtcatcagaaaacgcgatcgagccgtcttcctgttctttagcctgaaggtcggttttgatttgaaaggtgaaggaattgtagccttcatatttgtgaagcacaaggtcttcttttatgttttcgttaaatgtgtaggtttgtaaatcaatagcaggaaacacttgctgatacgtaagctcgttgctgtcttccttcacttttgctgaggcatctgtcggagtgattgcagcctgatcggggccttttgcgccggttaatgagtatgtgagcttatgatcaccgtgttcaaatgtagcgtataatccgtttttcatttgcttcagaaaatcggagttcagcactgtattttccgtcccgacatcctttgagccggttttcaattcaggagaaatgtcttcccagtccgcattggcggtttctttcgtatgaatggggtctgtgtagatttcctgtttgtatacaccctcgccctcataataaagttttgaattctcagttctttcagacgtgatctcaccgtcttgattgatatctttttgatcaaacggcatctgctcggatgctttttccgccggaagatctttttccgggtctgctgccggaatggcggcggttttcgcttgatcttgtttttcacgcgtttctgccgcaaatacatcggcaggcgcaatggaaatcataagcgttgccgcaagagtgccggccagccattttttccacttgttcttttttcctattttcataggttctcctccttcttttgtaatataggcttaacaatagtaatattattgaaattgtttatcaatattttcctaggtatttaaggttattttaaggattataggaattttgaaccttttattcatataaaaaaaccgccggctgccggcggttttttgtattatggatagcggagatttgtattttgcgctcccgcgtaggattgggcgaagtttttggcgtcctgggctgaaagcgtgccgtagctgtaatttgatctcggattccagccggtgcgcggtgatttcggggctttgagcgacgggaatgaaccggtgtcggtgaattgggcggtcccgtagtcgtctatcattccgcctttttcatttccgttaccgaaatagttggcttctgagaagacagtcgcgtttgtatgaatggtgaatcctaaattgaaattggtcacatagttgtttttcgcgtgaaaatagccgtatctcatcaggcccggtgaacgcacatagacgttattaaaatagttgttggtgatcgtcatatgcggatagccgatataattgcgtccttcgttatcatcattcggataaccgagaatcaggccgtacagatggtctgtgaatttagagttagacagcgtcacaaaatccgctttggcgccgacatacagaagctttcccaaatcgctgtggctgttcggattgtagctgtgtccttcaaaccacacgtggtcaatccagtaattctgcccgttcgctatgtacatcggaatgtcgttgttgcctgtaatggcggcattatggctgataatgagatttttgaaaatcacattgtttgatccggagccggtggtcagatagatgttggtcagcctgtggctggtataagagccgacgatggttttattggcgccgactgtcacaacggctttccccggggaagaaatatcacttgtgatgacgatggttttgcggtccgttccgcccgcattgtttttcagatcattgagattgctgacgtagacgacggggccgccctggcctcccgatacggcggattttgcttttccgttatgatccttcgcattgccagcgaatccggtaagtccctgcatcacatccggataagccgctgccgcttctgcctgcttggatgcggaacatacgatggccagacaaagcgcaaagccgagtgcagccaagaaagcgagatgacgcgtcttctttttcatgcccttcactcctttaatctcttaaattgcaaacacatgaagtattatacaattactatcctctttttccatgatctgtttgtctgctttttcgttatggctgaaaagccccaaaacaaaaaaagcagccgatacggccgcctatatacgggtgctgtctgcctgagtttccgccggcacggctttttgctttcgaatcagggacagtgccattcccgcaaaaatcaacacaatccccaaagattgataaaggtcggggcgaaaccccgtaaatacggtgtcaagcacaatcgccaccgccggatcaagaaatacgatgattgatataaaccgggtggataaaaaccgcaagctgtcaaaaaagagcaaatacacaattcccgtatgaatgataccggttgacacaatcatgatccagttcacatgcgacaaatcagaaaaagcgccgaaacggacgaacgggagaagaatgataacgcccaacccggtctgcaaacaggtgaccgcatatgggctgagactgttgatacctttcccggccagtgtcgtaaaggcgtaaaaaagggcggccagcacggcccaaataatacccgatcccatcagctgagaaaatgacgtatttccgttgatgccggaaatcagggcggtgcccagaaaacaaatcacgatggaagtgacggacacaatatgcagtttctcccggtatataaggctccctagaagaaggacgagaaccggagccagatgataaacggaaatggctatcgtcactgatgtctcctcaaacgatttaaataaaaacacccagttcagcacgagaaaaaatccgcaggccaatgtctgcaacacctcgcgccggttccattgttcggtgcggtgccgtccggaaccaaaccagcaaacgcccagaaacaaagaggcgcacagacatctcacaaagaccagttcaattgaaggaacattcgtatgttccgagaaaaagccgattgatccgaaaatgaccatggaaatgaccattttgatgacggcatttgatgtttgttcagcttgcattgatttgcttcccccatatcattgactgtttattcagacaaatactaacagccattttacttgattcagaggaagatttcatcctatttttcgaaagacggcggtcttttctcattaaaaaaagccccgcatcagcagggtcttctgtttaatgaacgatcagtacaggacaaggagacaattgtgagaccttatggctcacgcttccgagcatcatttctttaaatccgctgattccgcggcttccgacgacaatcagattgaaatgctgttctttcgctatgtttaaaatttgatgcgcaggttcgccttggacgtacaggctttccgcgtttaccccgctttcagccgctttctgcttggcattttccagaatggccgctcctttttgctcgacttcatgtttgatgtcttcaatgaagttttccggaacatagacaatccctgttaaggctgatgtggagacaacggcttcacgtcccgcataaagaatggtgagttcagcctgctgttctttcgccagatggatcgctgcgtccaaagctttgctgctcatgtctgaaccgtctactgctgcaagaatttttttaaacatatgaatcccgcctttctgcttttattgtcctcctctctttgctgaatgtcaattttgccggctttctccggaacattgcgcttacagactttctccgtttgtggcgatgacgtctttataccaaaccaaactacctcagcgttattttttaagcgcttaataaataggactttattctcttctttttcagtattacctattggtaaaagtagtgataaaatggaattattgatataaaaaaggagattatgatgagaaatcatagaggcttccatgaggaaattcagcaacaacaaaaactttatccaacatcacatcgcattcaaccggtcagcccaaaagaatatgcagaagttttgactttacatacggcaaaacaactgagcgagacatttcaaacacttgtggatcaagatcaatatgaacaagcgattcagctgagcgagaaggtcgcctctcagcttggaaaacatacgaatttttcattgccactttccacagtgctttatagtttaaatgaaatggaacttcctatttcagaggaattttctctacatcgtctgaaactgctaggaaatcatcaaactcatgagaactttttcaaagcaataaaacacgaaatgttaacggcggatcgggtagactttatggttagtttcacaaggtggtctggtgttcagcttttgatccctccgcttcaggagcttgctaaaagacatgtccctgtacgcatcattacatctacctatatgggtattacagaaccgaaggcgttaagacatcttcttcaatttgaaaatgttgagttgagaattgtaaatgaatataaaaaatctttccatacgaaagcatacttatttgaacgctgttctggacagcatagtgtcattgtaggatcttcaaatctatcacaagctgcccttacgactgggtatgagttaaatgtgagactacctgaaaccagatatctccccgtttatcaacaaacaaaagatttgtttgacactgtttggaatgaaaagacacagcctgttgacgaacaatttttacaagcctatgaggaattccaagctggaagccaaaaggtaagtgcttcctttgctgctcaaaactctctttacaaaacgaaaatgtccccgaatgccatgcaaaaggaagcattacgaaaccttaaaaaaacaagaaacgaaggggagacaaaagcagtcatcatcgccgccactggaaccggaaaaacatttttagcagcatttgattttgagcaatttaaaccaaataaatatctttttcttgcccaccgggaagagttactttcaaaagcaatcgaaacattcaagaaagtcacaaataatcatgaagattttggcttattgactggcacgaaaaaagaaagagataagcgttttttatttagcactatacaaacgttacataaaaaagatactttggaatctttttcaacagatgagtttgactacattgtgattgatgaattccatcatgcagaagcatctacctatcaagctgtattaaactactttacaccaaagtttttattaggtttaactgcaacaccagagcgtcttgacggtaaagatgtgcttcagatttgtgatcataatgttgtttatgaactcagactccgcgatgccctaaaggcagagctacttgcgccatttcactattttggaatttcagatcatactgtagattacgaaaaagtaaaagtgaaaaacggactgtacgaagagaaatcgctagtcaatcatttaaaaacgcataaacgagtagaatatatcatcaagatgatcaacatgtatggattccacggcgagaaaatggttggcttaggtttctgtacaaacgtcgaacacgcaatatacatgagtgatgaatttaataaattgggtttttatacaacttatttaacaggaaatgattctcctgcaaaaagacaagaggtcattcgtcaattagaggacccgcaccacagtttagaacttatatttacagtagatattttcaacgaaggaatagatatcccaaagctcaatctactattgttccttagaccaacggaatcaccaacgattttcattcagcaattaggacggggacttagaaaaactgacgacaaagagtttgtaacgatactggattttatcggaaactatcaaaagtcattcgttattccactcgcactatctggacaaacaagccaaaaatcttttgataaagattccctccgagtggccgtgacgcatgagttttcagatttacctggaggatcttatgttgacctttcagccataacgaagaaagaaattttaaataagatcgatcacattaaactaaattcagatgccatgctgaaaacgttatacaagcaatttaaacaagagctagggcgctctccagaattaattgattttctatactctgaacaggcacctgggcttaccttttttataaagaaatacaaatcgtgggtacagaccaaaaagaaaatggacgatttgaatgttacagatgaagggattctcaataaccccttggttgtagggatagtagcaagattagaacagcaattacctattaaatggccttatgaatggttaattttacagagcggttttcacaaaaatatcatcacaatagaagatgtaaaagaatcgttagaaaaacagtttcatattcaaatcacaacagatacacatgatgacctcattcagcgagcaatggagcgtttaacgaaatcagatcaaaaacagaattggcgctttggtacattacaaggtgatacattcaagttagatccagaagtaagcgagattttaaccgatccattattcggaccgtatattaaggagcgcgtccactatggactgattgaatttagacgtatgaacaatatagaagcccttgcttcaaaagagattaagctaacattgtatcagacctatacaagaaatgagctcatttatctttttcagtcaactgatcaggaagggacttggcgagagggtgtacgtagagttaaaaatcactatttaatctttatcaatttgaataagtcagaaaaagtagaagatcatttgctatataaagattattttattgatcctagccattttcactggcaaagtcaaaaccaaacctcacatatatcaagcgtagggcaaaactttattcaccataaggaaaaaggataccatattcatttatttgtgaggaaattcactgaaatgcacaacatcactttaccatttatttatttaggagaagcggattacgtatcaagccacggagacaagccaatgaatgtcaaatggaagctccatcagcctgtcccagaaaacttgtatgtggatttaacgaattaaagcagatacggtcggaagatcagcgggtgcccactctagtgattctagctcacgaataggcacccatctgaattccgcatgctcttttgctaccggcttccctgatacaatcctcgcttttattgaaattaaattgacgatgaccttctcatattcatgatgaatatcagctatcacatcgcccgtaacaattttacaatcaagttcctcttcaatttctcttacaagtgcttcccgagcattctccccttcttcaagctttccaccaggaaactcccacagattaggaagagacattgttggagaacgtagagcacatagaatttcattgttttcattttgtataactgcggcggctacttttattgtttttttcaaaattaaacttcctttcgttttttcttaggtatgtattcatatttttgttatcaattttatactgttcactgtaaacgatagaggttgagtccatcataattcaaatggtttattaaaagcaatagaaggtcattctcctaattagcaagaaaaaagcaccctccaaactggagtaggtgctttttcacttcactccccaaacagcctccccatcaccgctcagcacactaaacgtcacaacttctttctctctcgctgagtcccattctttcaggaagacaccgtcataatgtgtgccgttcaggttgattcgggctttgctgctgttcgttattgtccaggttccggtcatttccccggaaatggtgccgtcgttgttaagccggatggtttttggggttttgatcgtagctgtaatgtcttttccatgctggatgagtttgtaggctccggatgcggcggctgccgatatgtgtgtatccggttctcctgcgtagcggtacggcgctgcaacgggccatccgtctttgttcatgtacagccgatgcactctgacttcgtgctcttcgcctctgttcgggaaacgggtgtggaaaatgaggtatgatcgtttcgttttcccgtcgtaaaacacggagttgtgtcccggtgaaacgtagcccgtgcctttttcagattgtgaggcgaagctgtagccgcccatgagtttgaccccgtacggttcaattgctttgtcatcgaagaaactgccgtcttttcctttggcgtcaagcatgttatggcctgcggcgtcatagtacggaccgtccggatttttagagcgcgccacacgcatattgtagccgccggctgtgtcaagtccgccgaatgacagatacagatagtaatatttcgtttccggattgtagctgatgtacgggccttcgattctgctgtgatttccgccgagcagtttttttccgtagccttggttcgggagcgggaaaccggttttcggattcatttccagtataaaaatccccccggagtaagagccgtacaccatccagagcttgcctttatggtcaaaaaacgtttgcggatctacgacgttcgggtgaacgtttgcatgatacgtcgtgccgtcttcgctttttccttccatgcctgatttcaaaaagatgcctttgtttttgtagggtccttcgattttgtcactcacggcgacaccgagagcggatcgcggcgagtctcctttacaggcgttatagtacatgtaatatttcccgtcagccagctgagccacatccggcgcccacagcgtatcagactgggcccagtcgaatgtctcttttaattcggagtagacgttcgggatcaggggattattgggattgacgcttgaagacagttgctgccactgcatcaggtttttcgacttggcggaagccaaatgcgagccgaatacatagtatgtatcgcctgttttgatgacggacggatcatgcacgctgacctctgaaaaaacgggatgctgggcttttgcctgcggcagagtgaacccgataaccgctgctgagaccaggcacacacgaaagaaactggttttcattttctgaaatctcctcgctctcttcttttcttaaaacgctttcaagacaacgctctattttatgacgcggatggcggaaatatgtgatcaacagcgccggcttcccgatgtaccgctttaatacaatagcaatctgatttgtgaaagactggaaaaaaagttttgacttctgattcgcaaacacttaatataaaaaacagttactagttatcagaatatttaagaattgagtgaagcatatatgaccttacacaaagaccgccgcatcgggcgattgtccgtccttcttctgcttcatgagactgaagaaaaccagcagatcagccggctggaacgggacggctggaaagtctgtctcggcagggtgggttcaatggatgcgcataaggtggtagctgcaattgaaaccgcttccaaaaagagcggcgtcattcaatctgagggttatcgcgaatcacatgcgctgtatcatgccacaatggaagctttgcacggagtgacgcggggcgaaatgctgcttggctcgctgcttcgtaccgtgggcctgaagtttgccgtcttgcggggaaatccgtatgaaagcgaggcggaaggcgattggatcgccgtttccctttacggcacgatcggagctccgattaaggggcttgagcacgaaacattcggagtcggaattaatcacatatgaatcagcccatagatatcagatgatagggggctatgcgtgaaatatcattttcatggcatagctcctttttgtatgggcgctttaccaaagtaaagaaaaaggggttgaaatgatggtaacgttagacggttcctcactgacaaccgcagatgcccagcgtgtgctgtttgattttgaagaggttcaagcatctgccgaaagcatggaacgtgtgaaaaaaagcagggcggcggttgaacggatcgttcaagaagagaagaccatttacgggattacgacggggttcggcaagttcagcgatgtgctgattcaaaaagaagacgccgcggatctgcagctgaatctgattctttctcacgcgtgcggcgtcggtgatccgtttccggaatctgtatcgcgggccatgctgcttttgcgcgccaatgccctgctgaaaggcttttccggcgtacggactgagctgattgatcaactgctcgcgtttctcaatcatcgcattcacccggtcatcccgcagcaagggtcactgggggcgagcggagatttggcgccgctttctcatctcgcactggcgcttatcgggcaaggcgaagtcttttacgaaggggcccggatgccggcagctcatgctttggaaaagacaaaccttcagccggccgtcctgacctctaaggaagggctcgcgctgatcaacggaacgcaggccatgaccgcgatgggactgatcgcttacctcgaggccgaaaagctggcctatcagtcggaacggatcgcgagcttaacgatcgaaggccttcagggcattatcgatgcgttcgacgaggacattcatgccgcccgcggatatcaggaacagatggatgtcgcagagcgaatccgctattacttgtcagacagcaagctgacgaccgtccaaggggagctgcgtgtccaggacgcctattcgatccgctgtattcctcaagtccacggcgcatcatggcagacattagcgtatgtaaaagaaaaattagaaattgagatgaatgccgcgacagataacccgctcattttcgaagacggcgccaaaatcatctcaggcggaaactttcacggacagccgatcgcctttgccatggattttctcaaagtggcggcggccgagcttgcgaatatttctgaacgccgtatcgaacggcttgtgaatccgcagctgaatgacctgccgccctttctgagccctcagcccggcttacaatccggagcgatgatcatgcaatatgcggcggcctccctcgtgtcagaaaataaaaccctggcccatcccgccagtgtcgattccattccttcatcggcaaaccaggaggatcacgtcagcatgggaaccatcgcctcaaggcacgcctaccagatcatcgcgaatacgagacgggtgcttgccgttgaagccatttgcgcgctgcaggccgtggaataccggggtgcggaacattgcgcctcgtacacaaaacagctctatctcgaaatgagaaacatcgtgccgtccatacaagaagaccgcgtgttttcttatgacatcgaacatctgagtgactggctgaagaaggagtcttttctgccgaatgagcatcaccaaaaactgatgaccaatgaaggaggacttacaagatgactgatgtaaagaaatcaatccgcgccggccgcggcaccgaacttgaatgcttaggatgggagcaggaagccgtgctccgcatgctccgaaacaaccttgacccggaggttgccgaaaagccggaggatctgatcgtatacggcggcataggcaaggccgcgcgaaactgggatgcttttcacgcgattgagcgctccctcaaaacgttaaaagatgatgaaacactgctgatccaatccggaaaaccggtcggactgttccgcacgcacagccgcgcgccccgcgtcctgctggctaattcggtcctcgtgccgaaatgggcggattgggagcatttccatgaccttgagaaaaaaggactgatgatgtacgggcaaatgaccgccggcagctggatttatatcggttcacaaggtattttgcaaggcacctatgaaacctttgcggagcttgcgagacagcatttcggcggcagtctgaaaggaacccttacgctgacggccggacttggcggaatgggaggcgcccagccgctgtccgtcacgatgaatgatggcgtcgtcatcgccgttgaagcggatgaaacacggattgataaacggatagaaacaaactattgcgaccggaaaaccgcatcaattgacgaagcgctgcgctgggccgaaacagccagacaagccggagaacctttatcgatcggccttctcggcaatgcggcagaggtgcatcatgagcttttgaaccgcggcgtccatattgacatcgtgaccgatcagacttccgctcacgacccgctgatcggctatattccggcaggatactcacttgaggaggccgaccgcctgcgccgggatcagcctgatttatacgtaaggctttccaagcagagtatgaaaaagcatgtggaagccatgctcgccttcaagaaaaaaggggctatcgtctttgattacggcaacaacatccgccaggctgccaaagatgagggtctcgccgatgcttttgattttccgggattcgttccggcctacatccggcctttattttgtgaaggaaaagggccgttccgctgggctgcgctgtccggtgaccctgaagatatataccgcacggacgctttattaaaagagctgtttccagaaaatcaagccctccaccgctggattgacatggcgcagaaaaaagtcacgttccaaggcctgccgtcccgtatttgctggctcggctacggtgaacgggaaaagatggggctcgccatcaatgaattggtcagaaacggcgagctgaaagccccgatcgtcatcggaagagaccatttagactgcggatctgtcgcctctccgaatcgggaaacagaagcgatgaaagacggaagcgacgcggtcggcgattgggcggtgctgaacgcgctgatcaacacggcctcaggcgcaagctgggtttcttttcaccacggcgggggcgtcggcatggggtattcccttcacgcgggaatggtcgcggtcgctgacggcagcatccttgcggaacaacggctttcccgcgttctgacaagcgatccgggtatgggcatcatccgccatgcggacgcaggttatgaaaaagcggttcaagtcgccgaggaacaagacattatgataccgatgaaaaaggagcggtaacatgccgaaacaaatagataccatactcaccaacatcggccagctgctgacgatggaatccggcggcccccgatccggcgggagcatgcaggatcttcatgtcacggaaaatgccgtcatcggcgttcacgacgggcgcattgtttttgccggacatcaaggagcggagaaaggatacgaggcaggagacattatcgactgcgggggacggctcgtcacccccggcctcgtcgatccccacacccatcttgtattcggagggtcccgcgaaaaagaactgaatttaaaaattcagggcatgtcttatttggatattctggcgcaaggcggcggtattttgtcaacggtcaaagacacgaaagccgcctccgaagaagaactgattgaaaaagggctttttcacctcggacgcatgctgtcatacggcatcacgaccgcggaagtaaaaagcgggtacggactcgacaaagacacggagctgaaacagctgaccgcggcgaaaaaactgggtgagcgccagccggtcgaccttgtcacgacctttatgggagcacacgccattccgcctgagtaccggaacagccctgacgaatttctgaatcgcatgctgcagcttttgcctgacataaaagaaaaaggccttgcgcaatttgccgatattttcacagaaacaggcgtctttaccgtcagccagtcacgggactacctgaaaaaggcggctgaagctggtttcggcctgaaaatccatgctgatgagattgacccgctcggcggcgcggaattggcggcagagctgcatgctgtttctgccgatcatttggtgggggcatctgacgaaggcatcgaaaagcttgcggagtccggaacgatcgccgtcctgctgccgggcacgactttctatctcggaaaacacacttatgcgagagcccgggagatgattgatgcgggcgtacgggtcagtttggcgactgacttcaacccgggcagctcaccgacggaaaatctccagctcattatgtcaattgccgcgcttcatttaaaaatgaccgcagaagaaatctggcacgctgtcaccgttaacgctgcgtatgcgatcggaaaaggcgaagaggccggacaaatcaaagccggacgggcggctgacattgtcatttgggaagcgccgaattacatgtatatcccgtatcattacggcgtcaatcatgtccgccgtgtcatcaagaacgggaagacggtcgtttcaagggagggagccgctcttggataagtatccgtttctgcaaaaagccggctccctcttcaacgaccgccatgtgacaaggatcggcgatgtgacggaagcgtgggcgggacaaacgatcaaagggccggctttgatcggcgttccgctttctaagtcgtcaatcagccattccggcgcctgctttgcccccggtgcgatccgccgggcgctcggcggcatttccgcatattccgcggagctgcgggagcatgtcattgaccatctgtacgatatcggcgatattcagattcacgtcacggatgtcgtcaaatctcacgaacacatttatcggaccatttatgatattctgacggaccagcctgactgggtgcccgtcattctcggcggcgacaactccatcagttattccaccattaaagccattgcggaaacgaaaggaacaacggccgtctttcaattcgacgcccaccacgacgtccgcaacacagaagacggagggccgacaaacggcacgccattccgccgtctgttagatgaaaatatcataagcggacaaaacctgattcagcttggaatcagggagttcagcaacagcctggcatatgaaaaatatgtaaaagagcgtcaggcagacgtgcatacaatggagatgatccgggagaaagggcttctccgaacgatacaagacactttgccggccgttcaaaaaagagccgacgccatttttatttcggttgatatggatgtgctggatcaagctcatgcgcccggctgtcctgcgatcggccccggaggcctgtataccgaggaactgcttcaggcggtccggtttttagcccaggaggctgacatctcgggtattgagatcgttgaggttgatccgacacttgattttcgcgatatgacaagccgggcagccgcacacgtcattttacatgcattgaagggatttaaattgtcacgttaaagtcaaatccggcacgcgtgatctcggctgccggaagattctcatgccacgcaaaaagggggagatcacgatggatgttgatcaaggcggcaatcaactaaagcgcacgatgaaaagcaggcacttatttatgatttcattgggaggggtcatcggcacggggctgtttttgagcacagggtatacattgagccaggccgggccgggcgggacgatcgccgcttacctgatcggcggcttgatgatgtatcttgtcatgcagtgtctcggagaattgtcagtagccatgcctgtgaccggttcatttcaaacgtatgcgacaacgtttatcgggccgtccacgggttttatggtcggtatcatgtattgggtgaattgggtggtgacggtaggatcggagtttacagcttccggtatcctcatgcagcgctggtttccccacagcagcgtctggatgtggagcgcgattttcgcggctctcctttttgccgccaatgcattctccgttaaattgtttgcagaaacagagttttggttttccagcgtcaaaatcgtcaccatccttttatttatcatcttaggcggcgccgcgatgttcggtttgatttcattgcacggttcgggtgaagctccgatgctgtcgaatttcacctcacacggcggactgtttccgaacggctttcttgcggttttcatcgcaatgatttccgtaagcttcgccttttcagggacggagctgatcggaattacagcgggtgaaaccgccaatccggcaaaagatattccgcgttcgatccgaaatgtcgcctggagaacggtcatcttttttatcggcgccatttttgtgctgtccggactgatctcctggaaggaagccggtgtgattgaaagtccgtttgtcgcggtcttttcccagatcggtatcccatacgccgcagatatcatgaacttcgtgattttaacggctttgctttcggtcgccaactccggactgtatgcttccacccggatgctgtggtctcttgcgaatgaaaacatgatcagcgcccggttcaaaaaagtcacgccgaaaggcattccgctgaatgctctgctcgccagcatggccgtttcctgcatatccttgatctcaagcatcgccgccccgggcacggtctacgtggtgctcgtggcaatagccggatttgccggcgtcgtggtgtggatgagcatcgccctgtctcagctgttatttcgaaaacattatgtgaaaaacggcggacgcgtcgcggatctgaccttccgcacgccgttataccctctcgttccgatcgccgctgtgatcttatgtttcgcttcatgcgtaggccttgcatttgatcccaatcaaagaatcgccctcttctgcggaattccttgtatgatcctgtgctatctcattcgttttttgagaaagaaacagccgaaacaatccgtccgtgacattcatttggataaaaccatgccataaaaaaaaaggcacatactgatgaggtatgtgccttttttgtcttattccgtaatcagcgtatgaatcagtttcggcgcttccgctttttctgagatgcggatgttgtcatagactttggcggtcacgtcgtcaacgttttcgcggttggcgtaaagggtgacgagcggctcacctttttcgacgttgtcaccgacttttttgcggagcataataccgacggcaaggtcgatttcgtcctcttttgtcgcacgtcccgcgcctaacagcatcgctgcgacgccgatttcgtcagcgacgatttctgaaacgacacccgcttcttttgccggaacgtcaattttgtacgccgcctgcggaagtttggacggatcgtcaacgacagaagcgtctcctccctgattgctcaggaactctttgaacttttcaagcgctttgccgtttttcatgacttcctgaagcttcgttctcgcttcttccaatgtctcagcttttttcgccaatacgaccatttggctgccgagcgtgaggacgagttcgtttaagtcttcaggcccttcccctcttaacgtatcaatggcttcttgcacttccagagcattcccgatcgcaaaaccgagcggctgcgacatgtcagaaatcacggccatcgtctggcggccgacgttgtttccgatgcgaaccattgctttggcgaggttcacggcgtcttcatccgttttcataaacgcgccggctcccgttttgacgtcaagcacgatggcatctgctccggcggcgatttttttactcataattgagcttgcgatcagcgggatggaattcaccgtacccgttacatcacgcagcgcatacagctttttatcggcaggggtcaaattgccgctttgtccgatgacggctaccttgtcgcggttcacaagcttgatgaattcatcttttgacaattccacgtggaagccttcgatcgcttccagcttatcaatggttcccccgtatgcccaaggccgcggccggacattttagcgacgggaacgccgagcgccgcgacgagcggagcgagtacgagagttgtcgtgtcgccaaccccgcccgtagagtgcttgtcgaccttaatgccttcaatggcggagaggtcaatcgtttcccctgaattgaccatcgccattgtcagatcggcgcgctcctgatccgtcatatcctgaaagtaaatcgccatagccagcgcgcttgcctggtaatcagggatgcttccgtccgtgtatccttttacgaaaaattgaatttcttctgttgtcagttcttttccattttgtttttttacaataagatctaccattctcatgatctatcacctgtccttcatttatgttcagtgaatcaatccgacgatcgccgctgtcaggaaactgacgagcgttgcgccgtacagcagcttcagcccgaaccgcgcgacgacgtttccttgtttttcatgcagccctttcaccgcaccggtaatgattccgatagaggagaaattcgcgaatgagacaaggaatacagataccactgcctgtgtatgcgcgctgaaatggaaatcgccggatgagagcgtctgcatcgccacaaattcattcgataccattttcgtcgccataatgcttccggcgctcaccgcttcattccacggaataccggttaaaaacgcaaacggcgcgaatacatatccgagcagcgcctggaatgtaatgccgaagaccgcgttaaaaacgccgttgaccagggcaatgagtgcgacaaatccgatcagcattgccgctacgacgacggcgactctgaatccatccattatatactcaccgagcacttcaaaaaaggattgcttttcttcttcaggaacgaagatcaaatcctcttctttgctgacggtgtacgggttgatgatagaagcgatgataaatccgccgaataagttcagcacaagcgccgtcacgacgtattcaggcttcagcatcatcatgtaagaaccgacgatcgacattgagaccgtcgacattgcggacgcgcaaagcgtgtataagcgctgttcagtaagatagccgagctgttttttcaaactgataaagacttctgattgccctaaaatcgcggatgcgacagcgttgtaagattcgattttccccattccgttcaccttgcttaacgcaagaccgatatacttcgtgatgaagggaaggaccttccaatgctgcagaattccgattaaagcggatataaagacgatcggcagaagcacgctcatgaagaacgtcgtctgtttcgcattcacaagcccgccgaatacaaagttaatcccttctgatgcatattccagcaagtagttaaatccttttgcaaaaccgccgacaagaaaattcccgataccggtgttgaggagaatataaccgagaatcagctgcagcacgagcatgacggcgatcggccggattctgattctttttttgccgttgctggcaagccaggcaagacctaaaaacacaatgattccgataattccgatgagatacttcatatgtgttctccttttatttgtattcgcttacaattttttatgcatcaacaaagaaagaggatggcggaagctttcggcttccgcaatgctgattaatagtcgctgctgccgctgtctccgccgctcacgatagagacgcccgcacttgcgccgatccggctcgcgcccgcagcgatcatgctgtcaacatcagcttttgttctgatgccgcctgatgctttgaccccgatgtccggtccgactgtttttctcatgagagcgatatcttcagccgttgccccgcctgtagaaaaaccggtagacgttttgacgaaatcagcgcctgcggataccgccaagcggcacgcacgctctttttcttcatctgtcaaaaggcatgtttcgatgatcactttgacgagcgcttttttatcagctgcttcaactaccgcgcggatatcagcttcaaccgctccatcatcgccgtcttttaatgcgccgatattgatgaccatgtcaacctcagtggctccttttgagatggcatccttcgtttcaaatgcttttgtttccgatgtcgttgcgccgagaggaaatccgataacggtgcaaacgtcaactcccgtgcctttcagttcctccgctgcgagtttgacccaagtcgggttcacacaaacggaagcgaatttatattcttttgcttcttttatcagttgtaaaatatccgctttttgtgtatgcggtttcaaagcagtatggtctatttgacttgcaattgacattgtatgcacttcctttttcctaggatacgtttagaataaccgaattttgaacatatgtaaattggtaattgaaattatgttcatgaattgtcacaattcttgaatgagttttttggccgtatgctgatcagtaatcaaaacgttggcgtactttcctttcagggcaccgtgaatggccttgcattttctgctgccgcccgccaccagaatcgaacgctctttcaatttcaggtcgctgagctcaactccgatcgtcctgccgttaatgctgctgctgcaaatcctgccttcctcgtcaaaaaagcgcgaacaaatatcgccgactccgcgtgctttcagcaattgtttctcttcttcccggaaatagccgagtctgaaaagcagcgcctcatcccggacggttccgaccgtaaacagggcgatattggcttgtctgcccatttcaatgatccgcttaatatgtctgtcccgctcgaccatctgtttcacatcggcgctgtcaaatataaccggcagcggcaaatacctcggcatggtctgaaatgcttcggcgaacagctgaatcgtttctgacgaatacgtattgacattggaatgactgatgccgcctttcagctgcacgacttcaacgctctttacctgcttcggctccatgcggcttgcgatctggtacatcgtcgtcccccagcttacgccgagtatatcgccgtcctttacggttttatgcatatagtctgcgccatagcggcttaagtaatgtgtaatggcctggtaatcgtcgcttggagaaaagacgacgtgcgcctcaagcagcccgtatttttcttccagcttcgcgccgagttcatccagatcctcaaacgggtccatgacgcgaatttgcacataccctttttcctttgcgtactgaagcagccttgaaacggtggggcgtgacagattaagccgttcggcgatctgctgctggctgtaatctgattgataatatagttttgccgcttctatgctgagctgctgtttttcacgatccatgtcgcgcctcccctctccgcttatcatatcaccaaaacacgcggtaaaaaagcaccctctgatggggtgcctattttttcagcacaagctcctgaatcgcgtgcgccacgccgtgttcgttatttgatttcgtttcataatcagcaatctcccttacttccgggatggcattggccattgccacaccgcagccggcccactgaatcatggacatgtcgttgccgttatcgccgattgccatgacgtctttctgttcaatgccgagtttttcggccagcagcttgaccgcgtttcctttactgactttcgggtgaagaatctcatggaagaatggcgcgcttttgaccattgtgtatgtttccctgaatgattccggaatagaagcgatcgctttctccagcttgtccggatcgtcaatgaacatgactttcggaatcagaatatccttcggcacttcatcgatcgtgcggaaatgaagcggcactttcgtaatgtatgattcgtataccgtgtattcactgatatcccggttcggcgtgtacagattggctgtgtcaaagtaatgcatcggagtatccaactgtaagctcagctcgtaaagcgactccaaatcttcaaagcctaatgactgctcggccacgacaccgtttgtatacgtattttggacgagtgcgccgttataggcaatcacaaagtctccttcttcctgtaagttcagctcttccaaataccgacgcacgccgccgatcggccggcccgtgcacaggacgatattgaccccttccgctttggcggcatcaagcgccccgcggacttcagccgtcacttcatgatgatcgtttaatagtgttccgtccatatctattgcgattaacttgtacatcctgcatctcctttgtatccttttctgcttatgctttcatcatatcgttttttcgtttcaatgaaaaatcaaacggacaagtttctccgccttctcttcctataccgggcctgcctccggatgcggggccgtcttttccccttgtcagcttgttcgccgctgtcatctgttttctgcttcaagagcatcagccccgccgcaaagaaagggacggccgctatgtccagaagggcaagctttattcccatcgctgcgggaaagtatgcccataatgaacggctgttccgcctgatcatgatataagaaacgatttccagcaggataaacagagcgttcacccacaagtaaatgagcatcgccgcaaacagaaacagcaggagcgtattccgcagcgtgccggaaaacagaagagcgcgcatcatatcaaagaatgaaaaagactgcatgctgccgttgacgacattgggattataaatggtaaaacgcccgaactgatcaaaaagcataaaaaataaccataacagtgaaaaccattgaatgatatgtacgatgacacccgtcaaaacgagtctgtcggcagccttatttctcatgtgcatcctccccgccggtttttattcttgtcattgtttttgtttctccgtatatcttccaaatgagcgtatcgttttttcctcttttcaacgtgcttttgacggggtgcggatgtccgaggtattcaatctcgatcgtcccgtccgtgttttgtgagaccaccttgtaagcatctgagggcatgggaacctcgccgcggcctttaatgacctgctttgtcagcacgctgtctttcgtaaacgtaacggtttcagatctgaccccgtccatcgggcccggtttcagccccgcatcccatgtcccgtaataaaaagggggttcgtctgctttcttttgcgagcagcctgttatcatgacgcatccgataacaagaaccgtcatgatgaaaatccgtatgttccgcaacatgatcaccttcctttgaagctctttttacgcctgtaagttaggcggatgccgtggcactgtgcaattgactacatagtgtataaagacttcactagataaggagaatgatgaatgaacccatatcagtactacaccccatctgcctatttccctcagcagcaggaatacgaagtgagccccgttgagtatgagccgtatcagcagcaggaaagctattattatgcgccccctcagtctgaagagcggcagccgacggctttagaacggagagtcgcccagcttgaaagacaaaacgcccagcaaacgagagagctcacccgcctctcacaagaagaccagcgccaaaaccgggaaatcacgcgtatgaatgagcagatcagacggctgagccagtccattgaaatccatacccgccgcttaaaccgtttgaatcagcgcctgcgcgcagtcgaaaacagactcaatattccttttcacgctacagaaggcggcttctgagaaaaagggccggaatacaaagctcgacaggccatcccgagccttgtattccgctctgtacataacaggtaaatatttgaatccttttcttgcatgaatgcctctcctattctttcacatgataaatgtgtaaaatcaatcacttcaggaggtcttcatgatgtatcaaaaccaatacagcggaaatcagctgcagcaatgccgtcaaacagcacagcagcttattcagcagacacagcaaagcagtcagcagtacaagcaaatgctccagcaggaacagcaaaacattcaaatgcttcagcagatgcttaaccatgaacagcatgccgttcataccattcagcaagcgctgcaggggcatgaactggccattcagaaatgccagcaaatcgtgaatgtgtgcaatcagcttcagcaggaagtaagcggacacatgcctgcaccgatggcaaacgctaatgtttcttcattcccgcaaacacagcatcacacacaccgtttcagcagcattcataccagcaataggccggtcatgcaaatgacaaagcgcgagataccggctttgtcatttgtttttatctctgttttgtcagatcaatgcgttgagcgggttttccgccgaatttttcctccgcctcatgccttaccgcttcaaacgctcttgcttcgacgttttgtttaaacacatcaagctgtattaaataagccgcccgcactttcagcccgtggatgatggagatgacccataaaggcagcacgatatacacgcccggcgtgctcggcagcacaaaagcaattgctaaaataataaaatagataagtccgtatttcagccattttttgttcttggcccggtagccgatatagaaaaaggccaagaaagcggtcagcccaaacggcgcgaaagtcagcagcagccaccagctgtgcagcacttcccaccaagtccctcttttcgtaatcaacattcattcctcctcctttactactataacatggataatcaaggaaggttttctataaaaaacatagacggaatgacgtcttcctgctatattaataatgataatcattatcaccgaaataggggatcattatgaagaaacaatcatggctgatcggcctggcacttctgcttgttttcgcattaagcgcttgcagcggcgcgaaggaaaacaacggatcggcatcaggcaaaggaaagacagacatgcgtacatatgaatcaacaaaaggaaatattgacatacccgcacatccaaaacggatcgtcactgacttttatgcgggtgagctgctgtccgttgacgcaaatgtcgtcggggcgggctcatgggctttcaaaaatccgtttatcaaaaaacagctgaaaaacaccacggacatcggcaatcccgtcaatgtggagaaagtgatgcagctgaagcctgatttaatcgtgctgatgaaggatgaccaatacgagaaactatcgaaaatcgcaccgacgattgtcattccttttaacaccgcaaagaatacgaaagatacggtcagcctattcggcgacattgccggggcgaaggataaagccaaaagctttatggcagacttcaacaaaaaggctgaagccgatcaaaagcgcctcaaaaacgtgatcggcaaagacgagacagtcggcctttatgaaacgacggataaaggcgaaatctggatttttaatgacaattccggccgcggcggccaagccgtttataacgcactcggattgaaagcgccggccaaaatcgaaaaagacatcatgaaaacgggcgccatgaaacaggtttcccaagaggtcatccctcaatatgcggctgattatatgttcattaccgattacaatccgaatggagaaagcaaaacatttgagcgtctgaaagagtcatccgtttggaaaaatctcgatgccgtaaagaacaaccgtgtctttatcaacgatttcaacaccttctatccgtatgacccgattgccgtcagcaaacagatggatatcatcaccgacatgctgatcaaacgggctgaagaaaataaaaaataaaaaataaaaaaagcggcacagtcatgacactgtgccgtttttcatgttcactttaattttgactgtacggagcccggcatatcttcaaatctgacttcttcccaggtctcgacatactttcctttcgccttcaccttcaaatacgcgttcttccgaaggtctttcccggcgaaaaaggtcacttcttcttttttcccggatgcgttatatccgtctaatgtatactcagtaccgcccgggctaagatgtttgccatctcgatcaatctgtacataaacatcttgctggtgaataaacggattaaatctgtctgtaacatcattatgaaaaaagagaagtccgtatatgacggcagcggctgctaagacggccaggattgccaatgcttttttcatctgtgcactccccttacttgttcatttttttcaaatagcttgtccgcaccgctaggaagaacagaagctgaaagatgaaaaaccctccgatggtcagactgagcggccccgctacatcggaatagccttccaccgctaatgttctcaaagcaaacagcgtatgcatgacggcaatgacgaaaggaaagaaaaagagaatcgccaattgtatcgtcacgctttgtgccatttcacgctcactcagaccgattttggccaatgagcggtagcgctcccggtcctcatctaaatcggtgaacagcctgaaatataagaaactcgctgccgcgacaaagaaaacgatcgcgataaacaggccgatgaataaactcaggctcggcagctgcaccgtatcatagtacgtcccggcttttgccataaaatcagaatgcacgtcgatatagttgccgtaaatctcatttttcaaggattggctgatcccaagactgtctttccaatgatcatagctgtagccgtataatgacgctttctcaccgagtgatttcagctgatcaaaggtttgatcgttcaccgcgatgatggcattcaatgaaatcagcggttttttgacttcttttaccgtcagtttttggtcagacggcttgcctttttggttcagcagcttcagctgatccggcgcgtcgtttttgaaattgcggtcatacgtgcccgggaaatagacagcctcattatgtttcaggccgttcagcttaacatggaagtatgttgatacatccgattcgctgatcatataaacagggggaacagtttctccttcctgatagcgaacataggaaacatctattttgtctttcttatacgtaaagccgtgtgttttcagttcatggtcaatatctttcaaatgagtctgttctttcgggttattgctgaaagataaatactccatctcataggcggactcttccgccccgacggtcgatttgtacatcgcgagcacgcccgtcgccgtaaaggcaaccgcggaaataatactgacgataaagaacaggcgggcgttgtcttttaaacgatagacaaggtcagaaacccaaataacatttttcccgcgcagataaaaggttttccacttcttcagcgcgcgcagaatccagatgctgctttggctgaaaaagaaatacgtgccgatgacggtaagcagtaaaatgatgaacggctcggtcccgtggacattgcctttcagaaccatgccgtacccgccgcacaggcaggcgatgccgaataaggacagaagcacggacggcttcggctccggcttgatcttgtcagtgccctttattaatttgatcaccgtatttgatctgacaaaaaggatcgtgaactgcgataaaaggaaaaataagagcagaaatccgccggccgtaatgccgagcgctttccaaggcatgtacagaggcagcgcgtccatttctaaaatataagcgccgaccgtaaagaacgttttcgaaaaaatgaagcctccgataatccccgctgcgatcgacatgacgccgatgatcatgttttccgccgtaatgagctttctcagctgcaccggcgtaataccctgcatcagcagaataccgaattctttatttctcgatttcaaaaatgcgttaaccgaatacagaacaaataagaaagaaaaaacaaagatcatccattccgcggcggttaagccttttttggcgatgttattcaggtagccttcctttagtgccggatgaaacaggaacatcgcaaaggtaaagaaaatcaaaacggaaaaggcgctgctcaagaagaatgcaagataggcccttttgtttctcgtgacgtttttataagcgaactgaagaaaggtcatttgcgtttccccccagcatagacagcacatcaagaatctgctcataaaagacttggcggttttccccgcggtaaatctcattaaacagttcgccgtcttttataaagatgacgcggcggcagtagcttgccgcaaccggatcgtgggtcaccatcaaagccgtgacatgatcatcctgattcaggctctgcatcgtttccatgacatcttttgacgctttggaatcaaggtttcccgtcggttcatcggccagaataagtgacggcttatgaatgaccgctcttgcgatggcggcccgctggcgctgtccgccggatacttcaaacgtccgtttattgagcaggtcctcgattccgagctttttcgcgatgccgtgcagtttttcttccatgacagacggcgcttctttttcaagcgttaacggcagcatgatattttcaccgattgtcagcgtgtccagaagattgaaatcctgaaacacaaatccgagctgcttgcggcggaaatgagcgagctttgtccgcttcagccggtgcgggttttctccgtgaatcaggatatcgcctgaatccggccggtcgatcgttgaaatgatattcaaaagtgttgtttttccggagccggacggtcccatcaccgccgtgaacccgccttcttctattgaaaatgaaatttgttttaaagcttgataggatacttgtcctttataggttttatttatatgtttgacttcaagcatattcgccatgagaatcctccttatggttttattcttgttgatctgggctgctttcatgtagtgccggggcattcagcataaaaaatccccttgacgtaaatccatgttatcaaggggaaacagaatgagctatgttgttttcttaacgcagtcttacatttttgtaagaaatgaaaatcggaccgatgtcccttcaccggggacgagctgatgtccaccgtatgattgagcttgcccgtaatttctttgacgagatggaggccgattcccgtagattcttggaaacgccgcccgttttcgccggtgtaataagggtcaaacacccgcttgatatcttgcgagggaatgccgacaccgtaatctttgacttcaagcatcgtcctgtcttcatcgcggaagacattcagctccagtctgtcactcttgcctgccgaatatttgaccgcatttgtgacgacttggccgatcgcaaatttgagccatttggcatcggtgtaaatctgatgatcatcgcgaatatccattttcggatagacgcggtattgaataaaaaatcgtttatagctttgaatgaccgattggagaagctctgataaggaaaccgcttcgactttaaaatcccgctcaaacaggtcaagccttgatgaataaaggagcgtctccagcccgaattcaatctgccggacctcttttttgatttgttcaaagacgggctcatcctcttcctgaatgattaaattaatgaccgacagcggcgtttttacttggtgcacccattgattcatatacgtcacccgcgcgtcgagcttggcttcggtctcgtagagcttctggtgctgcagccgggtcagctccatctgcttttcatacagctctgaacagaacactgaagaaccgagatacgggatgtccgtcccttcctgctccgagctgagccaatgatacacaccgcggtctttgtaccagcgataggcaagataccccgccaaaataagaagctgcacgcccaatatgtaaaacaggtgggaaaaagaatgaagacccgcaaaccagtaataaaagaagacaaacagcccttgaaggagaaaaagcagaatcagcacggcatgagaccggagaaacagcttcatgacagcgccctcagctggtagccttcgccccgcaccgattcaatggaaacaggcgcgttcagctcccgcagtttttttctgagccgcgtgatatacacgttaagcgtattatcatcgacgaaaatgtcggtgtcccacgttttttccatgagccggtctcttcccgtcaccttttctccccgctccagcagcacttccaaaagcttgctttcttttttagaaagctcgcttttttcgtcctgaaagcgcagttcaaaccgttccacaaagagctgcacaccggcatattcaaccactttctctccctgcttggcggcgtactctccgtatgccctgcggatctggcttttgattttcgccagcacaatatcataagaaaacggtttttcgatataatcatctccgccgttttcaatcgccatcacctgatccatttccccgcttctggctgagatgaaaatgatcgggcttgtagaatgctggcggatctggcggcaccaataatagccgtcataagacggcaggttgatatcaagcagcaccacatcaggcttttcccgcaaaaagacatcaagaacagccgtgaaatccgcggcggccacggtttgatatccgtatttttcaaggtaattctgcaatagtccgcgaatgtcttcactatcttccacaatcatgattttattcaaactgaaccactcccgtttcttacactgctgccatcatcataatcgtttcgggcgtacggacgcaacaccgcacaaaaaaaccgccatcttggcggtttccgttttcatcagccgatctgctgttttacggctttaccggctgatccgaactctctcattttgcttcgcaccgtctcttccacggcttcaaggccgggtgtcatgtagccgcgcggttcgtacagatcgccgttttcctgaaacatgcggcgtgtttcgtctgtccaggctaccatacattccgtgttgatattgattttcgcgtggccgagcgtgatggcttttttgatctgatcctgaggaatcccggatgctccgtggagaacgaggggaatatcagtcatgcgggagatagccgccatttctttaaatccgagattcggctcgccctgatatttgccgtggacggagccgagggcggccgccagcgcgtcgatattggtttctttcacgatccgttcacattccatgatatcggcataacagaccccgccgacaagtccgtcttccatgccgccgaccgtgccgacttcggcttctactgagacgccgtgctttgcggcataatcggtgacttcttttgtcatcgcgatattctcgtcaatcggctgatgggagccgtcaatcatcactgagctgaatccggcgtcaatggcctgtctgcagcgttccgcactgcttccgtgatcaagatggagcacgacgggaacggtaatcgccatttcttccattaacgcgccgaccatggcggaaatcgttttaaatccgcctaaatagccgaccagacgatcggaagccgcggcgatgaccggcgattgctccttttgcgccgcttgcagaatcgccttcgtccattggaggccgttgatattaaattggccgactgcataatgctcccgtttcgcttctgcaagaagatgtttcatggtgacaaaagccatgttcacgcctccttcatgaagtattttgatacgacggcttccgttgtttcctttgccgttttgatcgtttcctccgcagtcagcttataatattcaggtctgaacagctctacggagacaacatcattgaatccgatttcttttaacgctgacagatgggcgtctaagtcaatcgcaccctgcccaggccagacgcggtcttcatccgttaaaaagccgatcggaaagtcttctgtatcgtcgatatgatagatgaaaattttctttccgtccgcctgcttcaagctctcaatattggagcccatcgcgtggaaatggaagctgtcaaacaccagtccgacattatcgcggccgacagcgttcacgatgtcatacgcctgttcaaatgtattgaccgtgcattgcgggtggccgacaaattcaagggcaatgtttacgccgtacggctccgcgatgtccgaaagctcagtcagcacctctatgctgctctttttgatttcttctttcaagattttccgctctgtcacaagcggcacggccaccacatatttcacgccgagcgtcctgcaggtttccatcatttttttgaattccgaaatgatctccctataacccttctcatcacgattgttgaagaaaaccagggcgttcagggcaagcggtttaatatgatgggtatgaaaatattccgccagatcggccagtgaatggtcttttaagtattccggcagcttatccattgtgcggatttcaatataatcatagccgtgcttttcgcacagttctaaatcctgtttcaggtttgaattctccagcgtagtcgcttcattaaagcaaagtttcatgtcagcctctcccatccgcgttttcgatatgaagggagtccggctgaagggcttttttgccccgctccgccgaactccatactcagcttatgccatacccagttcttcctttaatttcttaagcgtggtccggcttgattcatccgctctttcgccgacccaagcaaacacggcgttcgtcgcaattccgtcgaatttcatctctctcatctttctgaaaatcgtctcaaaatcgacctcgccttgcccgatgtccagatgctggtgaaccgttactttcgcatcaggcggattgacgatgtaacgcaggccgtgcgccgctttatgattaaaagtatctgcaaataaaacatgtgtgaggcggtcgccggcttcatcaaacatggtttcgatatcgcctttgccgtcatcatagaagaacgtatgcgcagtcgagtagacaagattgatccaatccttatcgagcgcgcggatcatatccatcgcacctttgtgcgtttcgataaaatcgtatggatgggcttgaagattgagtttaacgccttctttttcaaagacgggcagcagctcatccatggatttgatgaatttttcttcacttgtcaacggatcatactttgaaccgctgaattcactgttcatcaaatccacttcaagttcaaccgcaatttcgatcgcccgtttccagttgcgcacggcggcctggcggcggtcttcatcaggacccgcccagtggtaaagcggaagaagggaggacagcttcacacctgtatcctttaaaaggcgcttcaattgtttgatttttgctgaatcgactttcggatatttatagaaaggacaaaaatcctcgcgcggggacagttcgatatattcgtatccgagttccgccgttttatagaccatttcctctaatgttaaatcatcgcggtacatggatggatctaaggccagtttcattttttcactcccgatctattatttgttcacagtcgtaaatgattgatagaatgccggtttctcttgaagcgccactggctctttctgtccggattcctgagcttttacgcacgcgtctgttgtcaccgcggcaatataaccgtcccatgccgtcggaccgctgacttcgcctttcttccggatcgaatcaatgaagtcctgaatttccacatcatacgcagccgcaaatcggcgctgccagtccatcagaatatcggtgctgaattttccttcttttctcaagctgatgcttgacggttccggaagcttaatgacgccgtcttccccgacgatttcacattgaatgtcatagccgtatttacagttcacatagatttctgcattgatgacgatgccgccttttgtttcgatgatgaccatctgcggatctttcagatgcggcagcgcattttttgatttcttcggatagatgacttgtacggattcatagtcgtcattgacaagccagtggaggacatcaatttcatgaacgagcgtatcgacgacggccatgtccgttgaataattcgatgcgactgtcgggttgcggtgcgcacagtgaatcatcagcggctcgccgaccgcacggttgtcgatcgcttctttcagctgaacgtaaccgctgtcatatctgcgcatgaaacctacctgcaccaatcgttttcccgtcttcatttcttcctcgacaatgcgcatacagccttctgccgttgtcgcaagcggcttttcacaaaacacgtgcttgccgtgctgaatcgctttcaacacgctggattcgtgagccgggccccagcttgtcactaagacggcatccacattttcagcagcgagaaggctgtcgtcatcaggataaaccgaggcgttcaaattgaaatgctgaacggtctgctgcgcggcctcctgattcacatctgtgacagcggtaatttccgcgcccgacagcttatttgtgatgcggttgatgtgctcttttccgatagcaccggttccgataacacctatacgtaaattcattgatcgccactccttctgataatcaaataatggttctcgtctttcttttctctctgccgtcctgaggagcaccgtacagttcctcctgtatctgttcaagcgacttgccggacgtattcggtgcgaagacaagcccgatgatcatactggccgtcacacatatgagcagaataccggccataaaaccgatgccgaattgtgacatgatgaccggcacaaataaactccaaatgccgattgaaatacggacgagaaagaacatgagcccttgtgctgacgctctgtgttctgtcgggaacagctcgcttgcccacagctggtagttcgcctgctggccggctccgttattgatgccgatcgctaaaacaaacaaaagcagcatcgggagtccctgaaacggcagcaaaaacagcgaccagccgacaacagccataaaggcgcagattccgaacaccgttttccgatattgatctgcaaaaggcatgaagatacaggcgacgccgagcccggtgaagataaacagggccatctgcagaatgttggccgtatttgcggatacgccgccgacctgctggtagatgtacggcatgaagaatcccatgacgcccgcggcgagattccatacgagaaacacacccattaaaaacaaaatgttcttgaaaaatttcggctgaagcaagtcaaaataagatgtttttttcacggcggcaggccgctcttcactgtttttccaggcatccgactcaggtaaacgctttcttatcacatatgtgatcagggcgatcaccaatagatgcgcaaagacaattttatttcctaaaagcccgaggtcaccgaccaaaacggataacagcagaaccacaacggctccggcggcccacgccacctgcgccactccgcaatgcctcgcccggtttttctcgggggcgttttccgcgataatggtccatgaagccgtaatatccgcgcctacagaaatcccgataatcatgtatccgcataacagcatgggaaagttgaatccaaacaaaaccaaacaaattcctaaagcgtagacgagcatactgtttgtgtatacagcttttcggccgaccttatcagccaaatacccgccgagcagcgctccgatggccgctgatatcgcgtttgcgctgaaggcgccgagcaatccgatctgactgtcggacagcttcaagtagctgacccacatagataaacccgctgatcctgccacgatggaacctgcatcaatgtaatttgctaatgctgcggcgatggtccgtttgctgaaagctgattccgccttggcactattcatataagtcccctctaatttgcaggatcaagcagttcactgtcgatgtactttctcgcaatcagcgcgtactcaagcggattggcgactgccgggtcttgttcggcttcaatgacgatccagcctgaataatcatgacggacgagcgtttggtacacttcggtaaaatcgatgcatccgtctccgggcaccgtaaaaatgccctgtaaaaacgactgcctgaatgacttgccttcctgtctgcaccgctccataatgtcaaaccgcgcgtccttgaaatgaacgtgtctgatccgatccatatgcttgttgagaatcgtcatatagtctccgtctgagatataggcatggccggtatcataaagtaaatggacataccgcgggtccgttccatccatcagccggtcaacttcttccgccgtctggacgcctgtgccgagatgatgatgaaacgtgagctccagcccgtattcgtcagcgattttcccgagacggttcaagccttggcacagtgtatcccattcttcatttgagaagtgcggttttttcttaaatacatcaatatccaagccctggacactgtacgtctgttcagaaacgatggcggcatccgctccgactttctgcaaataatcacagtgttctgtaaattgttcagccgttttttcaataccgtcttgaatgataaagctgctgaaccatttccccgcaatccgcaagttccggagagccagctccttattgaggacggagggttcagggaaaaaccctcccacttccgtaccttgaaaaccggcgacaacaatatcgcttaacaaatgctgcagcgtattcccggctccgatctccggcatatcgtcattgcgccacccaatgggagcgatgccccacaaaatattttgtttgcccatcgtgatgcctcccctctagtactgcttcgcagacttcagcttcatctctttcgcttcgtatgcccgctgaacgctttcctgctcagacacttccgccacgccgacatgccaccagctgtcatagccgtccgtcatcgttttcggcagaaccttcatttcaattaaagtggatacctcttgcgttttcgcatcttcaagcgccgctttcagttcttcaaccgtattggctctgtatgttttagcgccgtagccctctgccaccttcgcgtaatcaacgtttaaaatctgattgtcctctgtgcggaactcgcagaaataactgccgctcccgtgatccatctgcaggttgttgatacagccgaacccggagttgtcaaagagcaggacattgatttttttgttatattgaagcgcggtaatcagctctgagtgcagcatcagaaagcttccgtcgccgacgagtgaatagacttctttgtcgggatgagccagcttgaggccgagcgtgcccgatacttcatatcccatgcaggaatagccgtactccagatggtacgtattcgggacgttggaatgccacagccgctgcagatcgcccggaagagatcccgccgaactgatgacgacgctgtcttcaggaatcgtgtcgttgatggtcaacagcgccgttgtttgcggcagctcagtctcgagcgcgtcggcatactcgtttaacacgtcctgtgagaaatggtttttaatttccggcttgaacgcgtcacgtgtaaaagtgaccttgccgagccggtcccgttcagccagccattcatctttccagcctttaatcgccgtgccgaatgcacttttatatccgtctaataagccgtgcagcctgccgagcgtcactttcgcatcggctacgacctgaaacgcgtcaagtttgtatgcctgcatgcggctgacattgatattcaaaaattttgctttgtcaaaatcaaacgccgttttcgaggatgtcgcaaagtccgtgtaccgtgtgccgacaccgatgatcagatcagcctggcgggcggctttgtttgcggcaagtgtgcccgtgatgcccatgccgcccagattgttggcaaaatcggcttcaaccgttgacttgccggcctgcgtttcgacaagcggaatgccgtatgtttcagaaagcgcgattaattcctcacgcgcgccggagtacttcgcgccgccgcccactaaaatgacgggacggctgctctccttaattctctccgcggcgcctttcagctcacgctcgctcggctgcatccgatcaatgtaatgaacacgtttttcaaagaagctttcatcaaaatcaaatgcttctccctctacatcctgagaaatgcagatggtcgccgggcccgcttttgccggatctgtcatcacttcaaatgcccggattaagctgctcatcagctgctcggggcgggtgatgcggtcccaatagcgggacacgggctttaacgcatcgtttgtcgtgacggcggcgctgtattcctgctccacctgctgaagcaccgggtcaggctgcctcgtcgcaaaggtatcggccggaagcagcagcaccgggatatgattggccagcgccgtacccgcggcagccgtcaagttagcggcacccggaccgaccgatgtcgataccgcgtaaatttttcttctcagcatctgcttgctgtatgccatcgcggcatgcgccatgccttgttcgtttttgccttgatagactttcaggtgcccggcgtcctgctcgagcgcctgcccgatccccaacacatttccatggccgaaaatcgtgaagatgccctcaacgaacggctcttcttttccgtcaacatgaatgtactgccggttcaagaattgaatcagcgcttgtgctgtcgttaagcgaattgtcttacccacaaacgatcccaccttttatacgttctatttaccgttaagactgtgctgcgcttcaatcagttcgatgatttcaccggcagccggcattgcttctgaggagctgtgtttgctgacgacgatggaagcggaagcgctcccgtattttaacgacgtttcaatatcccggccgctgaccagtccgtagatgaaagctgacgcataggaatcacccgctccgaaggtcttcagcacctttgttttataggcgtgcgcccggaaaacttctcccgatctgctgtatgcgtatgatccgtcaacgccgtgcttaatgacgacaaggtcggcggagtgcgcaaacaaatggcggacggtttcatcgttatttccgccgctgcggttttccattacgtcaaattcgtcacgcgtaccgatgacgatatcggattgttccgccgccagcgtgtagtacacggctgtttcttctgccgattgccatgtatacggacggtagtcgagctcaaacacgacttttacgtcatgtttttttgcgatttgcaccgcttttaagacggcttcgcgcgacgggcttttcgcaagcgccgtacctgatacgagcagcattttcgcgtttgcgatgtagccttcattgacttcggacggctctagatacaaatccgccacgtcatcccggtacatcagaatgctgcactcttcaggactgagaatttccgtaaaagcgagcccggctttgcgtccttctctgtcaacggtcatttgtgacgtatcgacgcccttttcctgcatataagaaacgataaatctgccgtgctggtcatccgggattttgccgataaaaccggcttttaatccgagcttagcgctgccgatcgcaatatttgccggggagccgccgacatatttagaaaacgtcatcgtttcttccatcggccggttgtattccgccgcgttcaaatcaatacacgcgcgtccgatcgcgacaatatcaaactctttttcttcattaaacgtatatttcatcgttatctgccactcctcacttgtcagcgttccagaatccattcatgggccggatcattatgaaacttccattttcgtgtcggtcccgccattacattcatgtagtaagaggtatacccgtccggaacaccaaccgggtgatagcccgccggcacgatgacaacgttttcattttctgcggtcatcgtctcgtcaatcgagcggtcgtccgtgtacacacgctggaagacaaatccctgcggcgggtccgtttcatggtaataggtttcttctaaaaatgattcagccggcagattgtcttggtcatgtttatgaggcgggtagctcgaccagttgccgctgtccgtgtaaacttcaacaacgagaaggctgtttgccgatggatctgaatcggggagaatgttatgaacggttcgtttgtttgccagcttgccgcgatgttccacaccgttgtcttccgctttaatcagctttgtcggaagctggtgttcggacggagagtagcacagcgcgaccctcgccccgctgacggctgtgattccaaaagagcggtcattggacacataaacgctgtccgtcggttttctatcaaatacgctttcacgggtgccgatgctttcaaatgtctgatcataatcagtgacggtaacttttccagttaccgcaacgatgcagcactccgtctttttcaaatcttctgtataggttgagccgggagcgagatcaacgactttaaatccgacgtatttgaggtctgaattggctgaagtgacgtcatgtatgatggtcacgccttgagaaatttcatcggcctgcggtttgcgcagcaaatgactcatgtttattcctccttaatggatggtaaaagaaaacccggacggaatcacaaagccgtccgggccggctgtctgatcaattgaagtcaggagacgggtatcgtgccgtcacgacttttttacgtgtatagaagtcgacgctgtcttttccgtttgcgtgcaatgtgccgaagaaagaagacttccagcccgagaacgggaagaatgccatcggcgccgggacgccaaggttgatcccgagcattcccgcgtcaatattctcacggaagtagcggatcgcgttcgcatttgacgtgaacaggcaggcgccgttcgcaaattcagactggttggcgatgtcaaccgcttcttttaaatttttcacacgcatgaccgacagaacaggcgcaaagatctcatctttccagatcgtcatatccgtcgtcacgttgtcaaaaatcgtcggtccgacgaaatagccgtcttccgttacatgttcacggccgtcacaaagcagtttcgctccttcttcgatgcctttttcaatatagctgtgcgtgcggtttttgttgtcctcgcggatgaccgggcccaagaacacgccgtcatccagtccgtttccgatcttgatgtctgcggccttttcctgtaatttcgccataaactcatcggcgattccctcttcaaccgtcacaaccgcgcatgccatgcagcgctctcctgccgaaccgaatgccgcgccgataatgtttgtgaccgtatcttcaaggtgggcgtcatttaacacgatcgtatggtttttcgcgcccgttaacgcctgcacgcgtttcaaatgttcgctgccttttttgaaaacatactcgccgacaggttttgaaccgacgaatgagatggctttaatctccggatgctcaagaatgccgtttacgacgtcatgcgcgccgtgcacgacattgaagacgcccttcggcagaccggcctgttcaaacagctctgccagtttttccgttaacagcggcgtgcgctcagaaggcttcagaatgaaagtgtttcctaacgaaatcgccatcggaaacatccagcacgggaccatcatcgggaagttgaacggtgcgatgccgccgaccaccccgatcggatagcggtaattcgccgcctctacatctgtggcgatagaggcaagtgaatcgcccatcatgagtgacggcgcgcctgctgcgaattcgacgttttcaattccgcgtcccacttcaccgagtgcttctgtcgtgtttttaccgttttccaaagtgatcagacgggcaagctcttctttgttctgctggagaagctgctgatagttaaatagaattctcgcacggcgcggcactgccgtcttcgaccatgttttaaacgcttctgacgctgagcggacggcgtattccacatcctcccgcgtagaaatcggaacctggcacatcacttcttttgtagccggattgacaacgtcttcatattgatctgtcttactttcaacccattcaccattgatgtagtttttcagttttctgatctctgccattctcattgcctccttaaatagtaaacatcctgttcagctggataataacggatgaatatattcatcttttacatataaaagacatgaattaaacgcttacaaatgctaaaatgatggtgactcccaatcttttcatgtaaaagttggtcatgtgccggataaagcaaacggttacatctttcacttttgattttacaggttatattttggtcatttcttggttacattgtaagcccaacacaccttcaagtcaatctaaaaaatcaaaattttttcattatttttatcatactttttttaagcgggaaaacaggaacttggagaaccgtgtcgaatcgtacggtgggaaccctcttttttatcatttgttaagtaactattgattaactcttggtgtttattatatattttaattactttaagaattctagaaggagtttttttatgaaactgatgcggattcaggagatggaagaatacattctcaaacacggagccacttcgctggatgagctgtgcgaggtattcaacgtctctaaaaacacggtcagacgcgatattaataagcttgcggaaaaaggggtgatcaaaaaggtgtacggcggcgtgacgtcagcagaaaaatctgtgctcgtcccttttgagaaccgcaccattcaacatcaggatgaaaaaatcaaaatcgcccgctatgcgtcgcggtttatcgaggatcacgatcttgtatttattgattccggcacgacgaccaaatcgatgctggagacgcttgacccggataagaatgtaacggtgttgacgaacagccttgatattattaacgccgcttcatccatgaaaaatatcgacctgatcatcatcggcaataactacaaacggaagacaaggtcgtttgtcggcattgatgatccgggcacactcaataaatacaacattaacaaggcgttcatgtccgctaccgggacaacgatcacccacggcctgacgaattccgacttactggaatacgaggtgaaaaagaaaatttccgaaaaggcgaacgaagtgtatctgctcgcggatcattccaaattcggcaaatccacgcttttgacatacgcgccttttgaccggcttcacagcatcgtcacttctcagcagctcgatgaggaatatacgaagtattgccaagagcaccaaatcgacattcacttggcatagcgttatagttaatagagaacgctgccgtattttcccggcaggcgctatgatatccaattttttcagggggcgaaaacatgagcaaagtaacaatcggcaaaactgacctaaaggtatttccgatcggtttgggaacaaatgcggtcggcggacacaatctctatccgaatctgaatgaagaaacgggaaaagaattggtccgggaagcgattaaaagcggcgttaccatgttagataccgcctatatttacggtgtgggccgttctgaagaattgatcggcgaggtgctgaaagaatataaccgcgaggatgtcttcatcgccacaaaagccgctcatagaaaagaaggcaatgactttgttttcgacaactcaccggcctttttgaaacaatcggttgaagacagcctgaaacggctgcagacggattacatcgatttattctacatccatttcccggatgagcatacaccgaaggacgaagccgttcaagcattgaatgagctgaaaaaagaaggaaaaatccgttccatcggcgtatccaatttctctttggagcagctgaaagaagctaataaagacggcttagtcgacgtgattcaaggagaatacaacctgctgaaccgtgaggcggaaaagactttcttcccttatacgacagaacacggcatctcattcattccgtacttcccgctcgtatccggactgctggccggcaaatacgacgagaacacaaccttcccggaaggcgacctgcgcaatgatcaggcgcatttccaaggggagcagtttaaagaaaacatcaaaaaagtcaaccagctcaaaccgattgctgaaaagcacaatgccgatacggcgcatatcgtgcttgcctggtacttggcgagacctgaaatcgatatcctgattccgggcgccaaacgcgcggatcaattaaaagacaacatgaaagcagcctccattacgctatctgctgaagaaatcgcgtttattgacaagctgttttcctaagaaaaataacacgcctttttgaaagggcgtgtttttttatgtttatatttttctcttcggggaatgaaatagttatctaaataaactattatgcgttccaaaagatgaggaggatcatctgtgaagaaaaacaccaaaaaatacctgatttactttttcggagcattgggcgggctgctttacggctatgacaccggtgtgatttcaggggctttgttatttattaacaatgatattcctttaaacacgctgaccgagggattggtcgtcagcatgctgctgctcggtgcgattttcgggtccgccttaagcgggacatgctctgaccgatggggccggagaaaagtggttttcgtcctttcactcatttttattatcggcgcgcttgcctgtgcggcttcgcaaaccgtcaccatgctgattatctcccgtgtcatactcgggttagccgtcggaggctcaacggcgctggttcccgtttatctatctgagatggcgccgacaaaaatacgcggaacgctcggcacattgaataacttaatgattgtaaccggaattttactcgcatatattgtgaattacatattcaccccgtttgaagcttggcgctggatggtcggtctcgcggcagtaccggcggcgcttttattaatcggaatcgcgtttatgccggaatctccgagatggctcgtcaaacgcggccgtgagcaggaagccagacaagtcatggaaatgactcacgacaaagaggatatcgccgttgaattggcggaaatgaaacaaggagaagccgagaaaaaagaatctacgctcggcttgctgaaagcaaaatggatccgtcctatgctgctgatcgggatcggcctcgccatcttccagcaggcggtcggtatcaacacggtgatttactatgcgccgaccatctttacaaaggccggactcggcacttcggcgtccgttctcggcacgatgggcatcggtgtcttaaacgtcatcatgtgtatcaccgccatgatcttaattgaccggatcggccggaaaaaactgctgatgtggggaagtgtcggcattaccttgagcctggcgtcactatcagccattctccttctggccggcctgtcagcttcaacagcttggctgaccgtgctgtttctcggaatctatatcgtcttttatcaggcgacatggggtcccgtcgtatgggttctgatgccggagctgttcccgtcaaacgcacgcggagccgcaaccggatttacgacattgattctgtcggcaaccaacctgatcgtttcgctggtatttccgcttatgctgagcgcaatgggcatcggctgggtgttcggaatattctcagtcatctgccttacatccttcttctttgccgcttacatcgttcctgaaacgaagggcaaaagtttagaagaaatcgaaacgcacttgaaaaaacggttctccttaaagaagcgcagcaaacaaaatcaaattcttaaacagcgcacactgtaatcaaaaaaggaatcgccccgctgggcgattcctttttggcgtcataccatgactttgcagatatcattcgtaaactcgaccggatcatggatcggcagcccttcaatcagaagcgcctgattgtacagcaggtttgtgtataaagcaagcttttcccgatcttgtccgtgcgcgttctttaacgtctcaaacacttcgtgattcgggttgatttccagcactttttccgctttgacctgctggctgtcaggcatggcgtttaacactttctccatttcgatcgtcacttcgccgtctgtcgcaaagcagaccggatgagattttaagcgttttgaggctctgacattcttgactttatccgcaagaatctctttcatgctttcgaacaggtctttatattcgttttcttcggcttcagtctgcttatcatcttcgtcactgtcgatgcctaagtcggcgcttgagacggatttgaactctttttcctcgtagcttgtcagcattttgatcgcgaattcatcaatatcttccgtgaaatataaaatttcgtagcctttgtccgccaccatttcagtttgcggcagcttttcaatccgctcatatgaatcgccggacgcgtaatagatatatttttgatcctcaggcattctggacacatattcgtccagagtgacgagctttttctccttagatgaatagaagagaagcagatcttttaagacgtctttattcgcgccgaaatcattatagacgccgaatttcagctgtctgccgaaagattcatagaaagattcgtatttttcccttttgttcttcagcaagctcttcagctcggctttgatttttttattgatgtttttcgcaatcagcttcagctggcggtcgtgctgcagcatctctctggaaatgttcagcgacagatcctcagaatccaccatgccttttacaaagctgaaatgatccggaagcaggtcggcgcatttgttcatgatcagcacgccgttggaatacagctccaatcctttttcgaattccttcgtataatagtcaaacggcatgttttccggaataaacaaaatcgaattgtagcgcaccgctccatcgacgctgatatgcacgtgggtcagcggtttatcaaaaccgtaatgcttctcggcgtaaaaagcctcgtaatcctcatccgtcagctcgcttttgttttttctccagatcggaaccatgctgttgaccgtctgttcttcctgaacttcttcaaattcgttctcgctgccctctttcggcttgttgaccgtctcttccattttgatcgggtagcggataaaatcagagtactttttcacgatcgctttgatgcggtagttttctaaaaactcatcatagctttcatcttctgtgttttcttttattttcagggtgatttccgtaccgacggtttccttgtcacacggcgcgatcgtgtagccggcggccccttccgactcccatacatacgcctcgtcactgccgagcgccttacttttcaccgtgactttatcagccaccataaacgccgcataaaacccgacgccgaactggccgataatgtcatggccgtctttcgagtcattttcttgcttgaaagcgagtgaaccgcttttcgcaatcgtgccgagattctgttcaagctcgtcttttgtcatcccgataccggtatctgtgacggtaagcgttctcgcttctttgtccgccgtcacttttatatagtaattgtcttgatcaaacgttaatgaatcatcggttaacgccttgtaatagattttgtcaatcgcatcgctcgcgttggaaattaactcgcggagaaaaatttccttctgcgtgtaaatggagttaatcatcatgtccagcaatcgcttggattctgctttaaacttttttttccgcacttcagatctctcctttaattatgctttgatgttatgtaaaatcttttcagcatctatttatcatatacagtgacaattgtcaactaggattagcagatgcatatattgtaaatttaacatgttaatggattcatttcacccattttatcaataaaaaagagagaatgttgatcatcctctcctctctgcttctttccggcggccgaattccttcttcatccatatgtatgacgggtagaaaaacaaactaaataagataagagatcccaagtttcgcaaagactcatgcagaacatttcttacagtgagaggaaacgtgatgtcctgaaacagaatagagataacggtgtagatcacaaatcccataggaacaatggcataacaataaaacgctatctccttcttatgctgtatcttcaaaatatgtaaacctcccaatgatgtatatacataatattaacatatttaataggtaattagaaacaaacctccgtatgtttatccccctattcagcgggaacaggtatagaaaaaggaggaatcgcaatatgggaagattaacagacaaaaccgcaatcatcacaggggccgcgacaggcatcggacaagcgacggcacgggttttcgccgatgaaggcgcccgcgtgatctgcggtgacatcaatgaaagcgaactgaatgaaaccgtcagcgccatcagaaaaaacggcggagaagcagaagcctttcaccttgatgtatcagatgaagaaaacgtaaagtcttttgcagacggcattcagcaaaagtacggaacaattgatattctgtttaacaatgccggtgttgaccaagagggcggcaatgtccatgaatacccggtcgacctgtttgaccggatcatcgccgtcgatctgcgcggcacatttctgtgcagcaaatacctgattccgctcatgctcgaaaaaggaggctccatcatcaacacctcctccatgtccggccgggccgcagaccttgaccgttccggctataacgccgcaaaaggcggaatcacgaacctgacgagagcgatggccattgattacgccagaagcggaatccgcgtcaattccttatcgccgggtacaattgaaacgccgctcattgataaattggcaggcacgaaagaagacgaaatgggcgaggcgttccgtgaagccaacaaatggatcacgccgctcggccggctcggaaaaccggaagaaatggcggctgtcgcgctcttcctcgcttcagacgacagctcttacgtcacgggagaagacatcaccgcagacggcggcatcatggcatacacttggccggggaaaatgctgattgataagaagtggaaggaagagacggagtgacgatagataataaaaaaagccagtgtaaaaaaaacactggctgaacaagctgagggcgggttacttaaaccagcccttttcctttgatcgggtaatggcttcaattcgatttttcacttctagtttatccagaatcatcgaaacgtaattgcggactgtgccgcttttgatgctgagggcgtttgcgatttctttcgtgttttttccgtctgcgacaagctcgagcacctctttttcccgttcggtcagcgggttttcttcactataaatgtcctccattaattcaggtgcatagacgcgtctccctttcatgacgctgcggatggcgctgacgagctcatcgctcgggctgtccttgagcatgtacccgctgacgcctgcttttagcgcccgctgaaaatagccggagcgggcaaaggtcgtcaaaatgatgattttcacaccgctgtccttgagttcttctgccgcttcaagacctgatttcccgggcatttcgatatccatcagacagatgtcgggcgcatgtttttccacgaaatcgatggcatcctggccgcttgtgcctttgccgacaaccgtcatatcctcttctaaattcaacagcgaaccgagtgcgccgagcagcatttgctgatcctcggcaatgaagatgttgatcatctgctaccatccttttcttttgattttgaatcattcgggattctcatggtcagctttgttccggcggctgtatcgatggctaaactgccgtttgcgaattcaagacgttccctcattccaagcaggccgtgcccctttgaaaaaaagcggtcttctctgcattgaaagcttccgtcatcttctaccgtaatgacaacctctttccaaagctgctgaatggtgatgcggcatactttggcgccgctgtgtttcacgacattggtgacggcttctttaatgcacatgctgacgatgttttcgttcagcaaagagatatgtttgggcgcttctttttcttcatacacaaattcaattcctgccgcttcaagaatttgccgaacattgccgagctcatccttcaatcggatgcctttcatcgatgagacgatttgtctgacctcatttaaggaagtgcgggccgtctgctgcacgcttttcagctcagcgcgggcctgttcagggtccttatatatcagctttcgggcaaggtcgcttttcagtccgattaaggagagcttttgtccaagtgtatcgtgaaggtcccgggcgatgcgctgcctttcttccagcttcacaagatcggcaattcgctcatttgcatattctaatttctcctcaaggcgctcccgtgcctttctgcttcgaatgctgagcggaagcaggatggcactgatcagtgtaatgacgataaacggaatttgtgtcaaaaaccattcttttttcagaacaaggctgaagttgacggcaaccgccgcactgatgatatgaatgtaatataagatgtaaaatggaactttgtctcggatatggccgatgaagtaggcaataaagaaggcgaaataaatataactgaacagcatggctgagccggtcgaaatgccgatcagaagaagcgcccataagtaaagcggccagccttttgcaacaaatgcaaagcggtatgcgccaaagaaaacgagcgtgaaaatgatgccggccacgatgacgaaggtagaagagcttttaaaaataaaataaaaaggcaggatgaaaaaaatcgtccatatataaggagaaatcccgttcagtttttgaaatttaaaatacttcttcatctttgttccaccttctgctgcttgtgtctaccatcactttatcaaaacaccgccttcattgcaccctcacgcatgaagagaaggctctttctgataagagaaagagccgtgcgccgtatcaggcatttttctttaaaggttctttcggcaccggatggggcgccgatgttttccgcgcctcccggaaggtgacaaactgcttttcgtcctcatcccacagacggaatttcatggattcaagacttgttttaagcgtaatggtcggtacgttttttaaaggctcgtgtccctcatgagcggcttccagcttgtagttcggcaccttcggacttaagtggtggacatgatgatagccgatattgcccgtcagccattgcaaaagcttcggcagcttgtaaaaggagcttccttctaccgcggcctgcacataatcccaatgctcatcggcttcaaaataagaatcctcaaacgtgtgctgaacataaaagagccagacgccgattgaccccgaaataaggaaaatcggaccctgaacaagcaaaaagttttcccagccgagaagcaagcacgtcgcagcagccaataagacaatcgccgcgttcgtgaaataggtgttccagcgctccttgcggcgggcgccttttacattgaaacggtttttaatcagaaatacgtaaatcgggccgagaataaacataataaacggattgcgataaagtctgtagcgtatttttgtccaggctgacgcttcgttatattccttgacggtcatcatccaaatatcgccggtgccccgtttatctaagttgctgcttgtcgcatgatgaatggagtggcttcgctgccattgaaggaacggaaacagtgtcagcacacctgaaataaacccgaacagccggttcagcttcttttgtttgaaaaaggattggtggcagcagtcgtggaaaataataaagattcttgtcaaaaatcccgctgctataacagtacaggcgagggtcagaagataggagacattgaggctgaagtaagcaagaaaccaaagggcaaaaaacggcacaaacgtgttgaaaagctgaatgatactatgctttgtatcggcgccggaaaatgcggcaacctgcttttttaaagacgcttgtttttgagttgcggcgtgattgatcatgaatgtcatgtcccttctttttcattatgacctcaagtataacggggcgcccgacgcggttgtagtagcagccatcatgccccgaatatgacatttgtcatgtttggcggcagaatgctaatcaggcgtcatatggaaggtttctttcatatctgcacttctcaaagaaaacagcaaaaaagaacccggcctgttttcggccgagttctttttcatcatcctcacagcaaaatcacccgatacttcttcacatccaaaaactgcagaaactcccgggccagcatatccggcgcgtggtcttttccttcatgaagacgatattgaatcagaccgacgagcatggacgcgacatagtatgcatagagctttttgcccgcctgaatgtgcagaggctgatgaagataaaacgattgcagcgctctgaacatttccgggatgacgtcaggcactcctgaaccctctctcagaaaatgaacgagcggaaggccgccggacagcgccgaaaagagccggacgagcgcggcttccgcttcttccacggaacagtcggcaggatctccttttaccgtcaataatccgatcagatcccggcatgattgatggatgatcgttttcagcaatgcttctttgttggcgtaatggtcataaaaagtggcacggcggaggttgctttgacgggcaatatcggaaatcgtgatcgccgcgtactcttttgtttccgccattaagccgatcatggcttcttgcaaggcctgcctcgtccttgtcacccggcggtcggcgggctttttttcttcttgttccggcacccggcggccaaacagccagtaaaaccgtttttgagaaatcaaatcccacacctgtccgctgatttcttccggggatgccccgggctcctcattcagccagtacaacacaatggcatatgtgtataacgcgcggtaatgaatgtacatatcctgttcagtcggtgagaaatccgcattgaccggtgacagcagcacatcatgccggaacacatcttttaaaaaagcatgaacgtgaaaatacggcattttatgacggtccatcatcgtttgaaaaaacacccggtgccggtcaacaaaagacagtgtcggatgcactttttgccatccgccctgtaaatgaagcacatctttattcttcagcgaatcatacagcgcttcgctcagcccgtctttcatttcttcctctatatcctctaaaatcgcatatttatcttcgtaataaaggtacagtgtcccccggctcacgtgcgcccgttcggcgatgtccttcatggtcacacggcggatatcccgctctccaagcatggccaaaagcgcttgtttgatgtcatttgtcatagaatccggcataagagacactcctttcattagacagatcacggcaatttgtacggtaacgtatagatgcgtttacgctgtctttgccgcaaaaacacatcacattataataggccctgaagaaataaaaaagcaaccagaggaggaaaaccgatggatcagcatataaaagcagacatcaaacgcgtctttgcgcttcagaaaaaaaatcaaaaaacgctgcgtgcttcaacagccgggcagcgcagagaaaagcttcagcgctttttagatgccgtcaccgcacatgaagaagaaatcatcgaggcgatcagacgggacgtccgcaagccttatcatgaggtgaaaagagcggaaacgcagggaacgatcaaggcgattaaagataatatgaacaatctcgacacctggatggcgccgaaacgcgtcggctcatccgtcagccccgacgctgacggcgtattaatgtacgagccaaaaggccttaccttaattctcggcccatggaattatccgtttatgctgacgatggctccgcttgcggctgccattgcggcgggaaacagcgcgattgtgaagctgtccgattttacgatggagacgagccatatcgccgcgacagttattcgcgaggcatttcacgaagaagaagtcgccatttttgaaggtgaggtcgatgtcgcgacagaactgctcgaccagccgtttgaccacattttcttcaccggaagcacgaatgtcggtaaaatcgtcatgacggcagcggcgaagcatttgtcgtccgtcacgcttgagcttggcggaaagagcccgacgatcatcgacagcggctatgatttgatggacgcggcgaaaaaaatcgccgtcggcaaatttgtcaatgcggggcaaacatgtatcgcccctgactatctccttatgaaggaagatgtacaggacacctttacagatctcctgcagaccattgtcaatgcaggttttatggaggatgatcatacggttgaccgcaacaaattcacgcagattgtcaatgaccgcaactttaaccgtgtcaaagccctgtatgatgatgccattgaaaaaggggcaaaaacggcgttcggcggcgtattcgatgctcatgaccgcacgatttctccgaccgtgctgacaaacgtcacgcctgatatgaagatcatgcaggaagaaatcttcgcaccgattctgccgattatgaattacgaagatatcagtgaagccgttgattacatcactgaacgggacaagccgcttgccttgtatgtattcagccataatcaggagctgatcgattatgttctgcagcatacgacgtccggcaatgcttctgtcaatgatgtcgtcgttcatttcactgacgtcaaccttccgttcggcggtgtcaatacgagcgggatcggttcatatcacggtgtgtacggttttaaagaattctctcatgaaaaaggcgtattcattcaagcctctaaataaaaaaaagaatccgcgtgcgcggattcttttttattatttttttgccccgaatgcgagcagtttcgtataagtgccgacgtagagcgtgccgtcttcagccagaaccggggaggaaatgacattgctgtctgtttgatagcgccatttttcattcccctcagcgtcaaccgcatagacgtttttatcgtcagaaccgaagtacacattgccgtccgcatcaatcagcggcgccgttctcacaggcccgtccgtatagaaagaccagttcatattaccggttttgctgatggaaaacagctcgccgcttcccgaaccgatatacacattgccgttatggtcgatcgctaatgaagagctggagaaaccgtttaacgggaacgtccactttacagcacccgttgatgtataggcgtataagttgccgtcctggtttccggcgtaaacggtgccgtctctatcaataaccggataacctttaaacccgttggacgtcgtttttgaccatttcacttggcccgttccggaattgatcgcgtaaaagatattattgtacgttgccgtatacagagtgccgtttgatgctaacacgggagcggagccgaccacgccgtttgttttaaatttccacttttgcgtccatgtcgatggcgacgtcggtttaatcgcatagatatagttatccagcgtcgacacatacagcgtgccgtcagagccgatagccgcatcggaactcggcgctccgctcagcggaaccgatgttaaaatgtttccggtttctttgtcgatgaaatacagttttttatcgtgagaaggaagataaatgacaccgtttgttccgagcaccggagtcagcgtataggtcgtcccgaggttttccgtcacccatttcacagtaccgtccggatgatacgccgtcagcttcccgtcttttgattgaataaatactgtgccgtccccgtcaaccgcggctcccgcaccgttttgaggggtggccggaacattcttttcccattttaacgcgccatcggcagtgcttgtaaaccggctttcccttgaccagttgaacatcgtcggagacatcgcctgcgcgtcataccgtcccgccaagaaaccggatgccgcatgattttgtttaaataccgtttccgcggcttgagcagccgccggatgcagccattttgcccccggcagatcagaaaccgcccccacagataaagccgcagcaaccgcagcgccggccgccaatgttttcattcgcaatgaagctgtcttttttttcaatgtcagttcctcccgtttctattaaaaactgctataccgctttcatcataccataatcatcctatgaaatatttgtattttcggtagatttatagaacaaatgtcacatagcctgctgatgcttcggggatgatcgaaacgcggcaatataccacaccacattgacgatgaaagccgcgcctgaccaaacgaaaagaccgtaataaagagacagctcctgccctaaggaaattgcggtcaataacgccaccaacaagacagccgcgcaaatgataagcccgatcccgcaaaaaacagccatgatgattttcatgccacgaacaccgagaatatacataatgagcgggaccgcatatataacaaggatctgaccgacggcggcccacatgcccgcggaattaaaacgattcgcgttcggccccgtttctgcaagcggagaaagcgagacgaggaccggcaataaacaaaacatcagagcggaaagcaaggtcaccgcaaccgcaccttttttcttttgattcatgtgaatatcctcctgacaataacccggcttttttaccggtaatctgataatatgttatattttagcacgatatttacttaatttgagaatgttttgtcaaaaacgaatttacaaatccagaaaaatagatataataaacgttatggaaccgatattgattcataaagcgttatctaacaaaacacgaagtgatattatgacgtggcttaaacacccggaagaccattttgatgaaagaccttatcttgatcagggactcagtttccgcaccggaatttgcgtcggtgatattcaggcaaagtcagggcttgcgcagtccgtcatctccagctacctgctgacgatgcaaaaagccggcctgctggaatccgaacgaatcggaaagtggacctattacagaagaaatgaaaaacaaattaaagcctttgctgactatgtccagcaccagctataaccatgaaaggagggatttttttgttctaacatatctatttttctatatatgtagttaaataaaaggaggcatacataacaatgaaaaaaagcagctccatcttcattctatttttggcactaggggttttcgggattatcacgaccgagatgggcattatcggcgttcttccgcaagtggcggacagatttcatatttctgcttcaaaagcggggtggcttgtcagtattttcgcgttcatcgtcgctgtgtcgggaccgtttttgaccttgcttgcttcaggtataaaccggaaatacattctgcttttagcggtgctgatgtttgccgtttcaaatgcggtctacgcgtatacggcgcatttcagtgtcatgctggcgtttcggatcattccggctttatgccacccggtgttcttttctgtagcgcttgcggccgcggcccggcttgtccccgccggccaatccggaaaagccgtaacgaaagtcttttcaggcatcaccgccggctttgcgttcggcgtgcctttcacgtcttatctggcggatcgtctctctcttgaagccgccttcttattcggcgctatcatcagtctcatcgcgttcacgggcattcttctctttttgccatccatgccggtcacagaaaaaatgtctttcagaagccagctcggcattcttcgcaaaccggctttgtggctcaatatcgctgccgtcacctgtctctttgcggccatgttttctgtctacagctattttgcggagtacctcgggcgggtgtcccatatgatcggcacatgggtcagcttcatgctgatgagtttcggggtgattatgatagccgggaatttcgtcttcggtgctttgttatataaaaatatgaaaaagaccgtcatcctgtttccgcttctttatacagccgcctacttgctcatatacgggtttgggacgtctttcgcgccgatggccgtcctcgtcttcgtatggggcgccgttcattccggcggtctcattgtcagccagacatggcttactgcggaagcaaaggaggcgcccgaattcggcaacagcctgtttgtctccttttccaacctcggcatcaccatcggaacggcggcgggcggctggtttatttcacatttgggaatccatcagctgatgtggtgcggcatcatgtttgcccttctggctttcgggctgatcatgggacgcttggcatggggaaagaggctgctcgcagaagcttaagctccattgcaaaatccggaatgattacgtataatattccagattaaagcaagggagagaaaaagatacatggaaagaccggcaggattttggattcggtttctggcttacgtcattgatcaaatcatcataggaattccgatttttatcattcaatttatggtctcttttttatttgcggcaggcgttgcggcggctgaccccttcatgaccgaaaatcagtttaacatctcttttctggtgttcggcgtcattccgattcttgtgagctctattgtgatcagcatcttatatttcagcctgctcacagcctcaaagatgcaggggaccctgggaaaagcattgctcggccttaaggtcgtcaatgaagatggcggacgcatttccatcggccaggccttcggacgcgctttcgcctatatcatatccaagctcattctttatatcggattcatcatgggtgccttcggagagaaaaaaacgctgcacgacatcatgtgcagcacccgggttgtttataaataatgtccccaagtccgggccttttgagcccgggcttttttatgacggctgtgcccgcctgatgtcaatgccgccttctccgtcagcctcaatgcggatcgtcccgttcacaatgacagacagcggatggaactccgcatgctgatcagaaaaaatccagcggcggccgctcggccctaaaagcaaaaacgccccatcattgtaatcacccataaaatgaaacccgttttcactaagaggcgcatgctttctcaccggaatgccgagacgctgcagctccttccccgtcgataccacctcggcagccgtcagattcacctcaccgatattcagaacggactcaatcgaaaaacgttccgcgcttggcggcgatgtgtctctcgcgatgaattccgccagattgttggacggatctttaaaataaaaggaacgcgcctgaatatgggagaaatacacctcatcctccccatcttccgtttgaaaaacgactttatcctttatccacgccttcgcctcatcaaaacgattattcggaatgttaaacgcaaaatgatacgtcggttgagagtgagaatcggcgcgcctgaattccaactcactttctcccgccttgatggtaaacgaatccccggactcatcaattaaaggaaaacctaacacccgttcatagaagtgtttcgtctcctccaacgcacaactgtacaaagtaatgtgatttatttgcatgatcataccccctttggtttatactgccatatagaggggttgattcctactgtttcgattcaccaattgagaatccccctttcgcccggcgctaaacatgacaaacagcgccaaaccgcttataccaggcgttttttaacgtctaaagcaaaaaaagcagaaaataataccccatatagcttgacaaaaaataaatgttatttaataatctatatataattagaattattattgaaagataaagtgaatgctttgtctttttaatatatttcaaatcacatttcaggaggaagatattatgtctttaatcggaaaagaagtactgccattcgaagcaaaagctttcaaaaacggtgaattcatcgatgtaacaaacgaagatttgaaaggtcaatggagcgttttctgcttctacccagcggatttctctttcgtttgcccgactgaacttgaagatcttcaaggacaatacgctgcactgaaagaattaggtgttgaagtatactctgtttctacagatactcacttcgtacacaaaggctggcatgacagctctgaaaaaatcggcaaaatcacttacgcaatgatcggtgacccatctcaaacgatctcccgcaacttcgacgttcttgacgaagaaactggtcttgctgaccgcggaacattcatcatcgatcctgatggcgttatccaaacagttgaaatcaatgcaggcggtatcggccgtgacgcaagcaacctagtaaacaaagtaaaagcagctcaatacgttcgtcaaaacccaggtgaagtctgcccggctaaatgggaagaaggcggcgaaacacttacacctagccttgatttggtaggtaaaatctaaggagtgcattccattggtacttgatgcaaatatcaaagcacaattaaatcaatacatgcagctaattgagaacgacattgttctcaaagtaagcgccggtgacgatgacacttctaaggacatgctggctctcgttgacgaactggcttccatgtcatctaaaatttcagttgaaaaaactgaattaaacagaacaccgagcttcagcgttaatcgtaccggagaagacacaggcgttacattcgccggtgttcctctcggccacgaatttacatcattagtgctggcattgcttcaagtcagcggcagagcgcctaaggctgatcaaaaggtcattgaccagattaagaacatcagcggagaataccgctttgagtcttatatcagcctgacgtgccacaattgccctgatgtcgtccaagcattaaacatgatgagtgtgctcaacccgaatatcacacatacaatgattgacggcgcggcattcaaagaagaagtagaaagcaaaaacatcatggctgttccgactgttttcttaaacggtgaatctttcggcagcggccgtatgaccatcgaagagattctcgcgaaaatgggcagcggcgcagatgcgtctgagtttgccgacaaagagccgtttgacgttcttgttgtcggcggcggacctgccggcgcaagcgcggcgatctacacggcgcgtaaaggcatccgcaccggtgtcgtcgctgaacgcttcggcggccaggtactcgacaccatgagcatcgaaaacttcatcagcgtcaaagcgactgaaggaccgaagctcgctgcaagccttgaagagcacgtgaaagattatgatattgacgtcatgaaccttcagcgcgcgaaacgccttgagaaaaaagacctcttcgaacttgaacttgaaaacggcgctgtactgaaaagtaaaacagtgatcctttcaacaggtgcccgctggcgcaatgtcaacgtacctggtgagcaagagttcaaaaacaaaggtgttgcatactgcccgcactgtgacggaccattatttgaaggcaaagacgtagccgttatcggcggcggaaactccggaatcgaagcggcgattgaccttgcaggtatcgtcaatcacgtgactgtgctggagttcgcgcctgaactgaaagcagacgaagtcctgcaaaaacgtctttacagcctgccgaacgtcactgtgcacaaaaatgcacaaacgaaagaaatcacaggcgaccaaaacgtaaacggcattacgttcgttgaccgtgaaacaggcgaagaaaaacacgttgaactccaaggtgtattcgtccaaatcggtctcgtgcctaatacagaatggttagacgaaaccgtcgaacgcaaccgcatcggcgaaatcatcgtcgataagagcggcgcgacaagcgttcccggcctatttgccgcaggggactgcacagacggcccgtacaaccaaatcattatctccatgggatcaggtgcaactgccgctttaggcgcatttgattatttgatccggaattaatgtaaaaagcgctaccctgcttacacggcaggatagcgctttttttatattaaaacggcatactgcatggcagtacaccgtctgaagtaattcaatctgtctttctccctctcgcccgatagataagaaacaatccaataaaccacagcggcgtcagcagcaaagccgggcgcgtcgcatccgcaaacagcataatcaccagaatgaaggcaaacagcgccagcacggcgtaattgataaacggcgcaaacggcgccttgaaagacgagcttgcgtgtaagtccggacgggttttcctgtatctgatatgacagacaagaatcacgccccacacccaaatgaaacagatcgcgctgatggttgtcacgatgccaaaggccgcttccggtatcaatttgcttaaaagagcgcccgctgacagcacaataaccgatatccataacgcgcggctcggcacatgatttttattcagcttcgcaaaacttgccggcgcctgtttcgttttgcttaagttatacagaatccggcttgttgaaaacatcccgctgttacaagcagaagcggcagacgttaatacgacaaaattaatgattcccgcggctaacggaatgccgaccagactgaaggtctttacaaaaggactttccgttgcattcagctgcatccacgggttaatacataaaagaatgatcaatgccccgacgtagaaaaataaaatccgcaatggaattttattgatcgcggacggaatattttttttcggatttgacgtttccgccgccgacacacccactaattccacaccgacataggcgaagatcaccatctgaaatgaaagcaaaaagcctgaaaatccgttcgggaacaagccgccgtgctcccacagattcgccgctgaaaccgttccggtatgcgttttgaacccaatcaccagcagaaccaccccgatgacaattaacgcgagaatcgtgactaccttaattaaggcgaaccaaaactccaattctccaaaaatcttaaccgttaacagattaagccctaataaaatgagcaaacagataagtgccggaatccactgcggaatatcaaaccaatatttcacatacacaccgacggcgatcacatccgccatagccgtcataatccagcaaaaccaataagtccagccggtgacaaacgctgcacgcggccctaaatacgcctcggctatatccgttaatgattggtaccccgctttagataacagcagttctcccagcgccctcatgacgaaaaaaagcgcaatacctacaataaaatacgcaaagatgatagaaggacccgccagctgaatcgccttaccggaccctaaaaacaatccggtaccgatcgtgccgccaatagcgatcagctgcacgtgccgattcgataagtccctctttagctctcgctgctccacatctgactcctccttacctctctagtgaacgacgagcaaaaaaagccaataaaaaaagagattggatgccctccaatctcatggtcataagaatatcaaattatatttgcgccgctgacaatcaacagcatgacaaatacatattcggtactcttctgtccttttgcctgagattgtgaacccttcggcgccgcggaaaacccgcggtctctccagaagccgctcctgctgtagtgcgacccacagcaatcatagcctgctacgtattgagtttccgatagaaataactatcagctaactttttattttaatggaagttgaatgcattgtcaacaggggtatacgctcacagcgttatcccggtccaatttttgatgcctgaagcgccgtatcttccgttttcattgtctcaaaaaggcgttatgcggtactatcatataaggtctaatcatttaaacattatgtcatactttaaattcactttatcatacaattgctcgtaaataaaaaggggatggacgagattggaaaccaaatatttagatctgctcgcacaaaaatacgattgtgaagaaaaagtggtcacggaaatcattaatctgaaagcgatactgaacctgccgaaaggaaccgagcatttcgtcagtgatctgcacggggagtaccaggcattccagcacgtgctgcggaacggttcaggaagagtaaaagagaagatccgcgatattttcaacggcgtcatttacgatagagaaattgatgaattggcggctttggtctattacccggaagacaaactgaagctgatcaaacatggctttgatacgaaagaggcattaaacgagtggtataaagaaacgattcatcggatgattaagctcgtttcttattgttcttccaagtacacccgatccaaattgcgcaaagcactgcccgcccaatttgcttatatttccgaagagctgctgtacaaaacagaacaagccgccaacaaggaacaatactactccgaaatcatagaacagatcattgcgctcggccaggccgataagctgatcaccggtcttgcctacagcacgcagcgattggtggtcgaccatctgcatgtggtcggcgatatttacgaccgcggaccgcagccggataaaatcatggaagaactgatcaactatcattcagtggatattcaatgggggaatcatgatgttctctggataggcgcttattccggctcaaaagtatgcctggcaaatattatccgcatctgtgcccgctatgacaatctggatattattgaagacgtttacggcatcaatctgagaccgctattgaaccttgccgaaaaatattacgatgataacccgtctttccgcccgaaagcggacgaaaacagaccggaagatgagattaaacaaatcacaaaaattcatcaggcgatcgcgatgatccaattcaagcttgagagcccgattattaagagacggccgaactttaatatggaagaacggctgttactggaaaagatcgattatgaccgcaatgaaatcacgctgaacggaaaaacgtatcaactggaaaacacctgctttgcgacggtgaatcccaaacagcctgacgagctgctagaagaagaagcagaagtcatggacaagctgctgttttctgtccagcactccgaaaagctgggccgccatatgaattttatgatgaaaaaaggcagcctgtatctgaaatataacggcaacctgttgattcacggctgtattcccgtcgatgaaaacggcagcatggaaacgatgatgatagaggataaagcttatgcgggccgtgagctgctcgatgtatttgaacggttcttacgggaagcgtttgcccatccggaagaaaccgatgatctggcgacagatatgacgtggtacttatggacaggcgaatactcctccctcttcggaaaacgggccatgacaacctttgagcggtatttcattaaagagaaggaaacgcataaagaaaagaaaaacccgtattactatttgcgtgaagacgaggcaacctgccgaaacatcctgaaggaattcggcctcaatccggatcacggccatatcatcaacggccatacaccggtaaaagaaatcgaaggcgaagatccgatcaaggcaaacggaaaaatgatcgtcatcgacggcggcttctccaaagcctaccaatccacaacaggcatcgccggctacacgctcttatacaactcatacggtatgcagctcgtcgcccataaacactttaactccaaggccgaagtgctgagcaccggaaccgacgtcttaacagtgaaacgattagtcgacaaagagctggagcggaagaaagtaaaagaaacaaacgtcggtgaagaactgatgaaagaagtggcgattttggagaaactgcgggagtatcggtatatgaagtgaagaatatggagttcagagatgattctctgggctcttttttttacggttacggactaatgagtccctttccctatacgtaaaacggatttaaccgcttcttcaatctcccgataaccggtacatctgcaaatattggactccagccaatttttaatcgtgtcatcacttgcattcggctcagtattcactaaagcatgacaattcatgagaaaacccggtgtgcaataaccgcattgaaacgcgaatttttcaataaaggccttttgaatcggcgtattgatcagtccttcaattgtcgtaatatcctttccttccccttctgccgcaagcattaagcaagatttcatcggcaccccgtccgttaataccgtacaggcgccgcaatccccatttaagcagcccggctttgcaccagttaatccgagacgaagacgaagagcaaataacaaagtatcagccggtctgaccgtcatctgtctttcctcgccatttactttcaacgtaataggatcagacatttggacctccttctaattcccgtaaggcatctaaaattgtatgttgcaagacaaatattcggtattcacttgagccttccgcatcatcaagaacgggtttgggtacatactgtaaagacctgcgcgctctatcttctaatgaatagcttttatcgttaagcacagcctccatttcagcagaacgaaacggaaatggacatacgccgctgaaagccattctgatctcatcatcttttttcagcgcacagactgtcaccaatggatatccgacattccactgctgtcttcttttgatactgacaaatggcaagtcaacatacgctcgatcgacaacgatatgaaataaaaaatcacctttttgcaattgtatttccttgttaaatactttatttataggatggtaatgaatccccgctctccctgcaatccctagcaaactatcagaaatcagcaacggcagcacggcctcacggtagtagatgcccccgcaaatgtttccgcccaggctgatcttatttcgagtcgtccgatcggctatttcacttactgttttacttaatagcggaaatggattttcttcctccagtttcgttaatgacacacccgctccgatcaccagttcatgttcataaaagcggatggtttgaaatcccggaagcgcgttcatgtctatcaccgcatccgtatagatgatattcagccttcctaacgtgataatttccgtgccgccggaataatacattggtgttttcttttcggccgcaagcgagtgaaatagattgattgtttcttgaatggtcttcggtttaaaataatcaaaatcaaacggtatcatctttccacccctcttgcgtcctccataattgttcgggaatgagaggaagttgattcaattggacacctaaagcggcggaaaggcaatttcccaatgcggccggcatccccagcagtccgtgttccccgccgccgcgcgctccataaggcgcaatcacatgcggggtttcaacaaattcaatgatatattcaggctgctctccatagtgaagggggcggtatgttctaagctgaggatttaatactctgccatatgaatcaaatacaaaggtttctcttcctccgaatgcgattcccatactcatcccccccatcacttgacccttgcagctttttcattcaatactgttcctatatccacaacagaataggcttttgtaattcggtacgtataatcccgtttatccaactcaacttcaatcccctgagcacctacagcccattcgggtcccggctttcctcttcccgtttcccggtctaaattcgtcatccgggttaatgtgtaattgccgctcgcaatgatttggccgccaatggtatttccattcggaaacgtatatccgtaagcaatgtcttttatgtcaacatgtacagaaggatgatctataaaataaacctttccgtcggccacttccaattcctcgacaggaactcgcaacacacatgatgccgcgtccttcagctttcgaatggcttcctccgctgcattcagtacggcttttccggccattaacgtccctctgctccccacggttttccaatgctcgggtgttgtttgtgtatctacaagcatttttacgtgaattttgcttatatccattttcattcgttccgctaagatttgggctaacactgtttttgtccctgtcccaatctccactatccctgacatcaaattaatgcttccatcaggattaaaggttaaaatcactccggacgttgcatttgtatcaaatgttgaggttttccaaatacagctgatccccttcgcccgtatcttccggccgtcgatttcaattcgctgtccctcgtcccaattcattaattccttcaatctttcaatacatttcggtacatttccgaccgtgcttgaattgagaagaacttgagtcggtgtggtgtcaccggggcgaatggcatttttatagcgaagttctaacgggtccatgttcagcttttccgccaatacatccatcgtccgctcaaaagcaaataacacttcagcatggctgtagcctctgaatgcacttggatatggatgattcgtatacatacaatatgaatcacacgatatatggtcgatagcgtacggacccgtacaatcaaccaccgcagcccggctgatgtccactcctttatcagagtatgctccgccatcaaataaaagctgaatgtccgccgcctttaaaattccatcctttgtggcccctaatttgacaatggcatccaatcctacatgaacgggagatgtgatcatatcctcttctctcgtattaaacaatttgacgggccggcctccgactgcttttgatgccaaataggcaatcacctctaactgaacggctgcttttcccccgtacgccccgcctactaaaggcgttttgacgataacctttccgggttcaattccaaaataccactgcattaattttttaatggcaaaaggggcttgagaggatgtggtaatgataatctcctcatccgcccgaatttcagcgatcgagcatcttgtctccatcgcagcgtgatcagaagggttaaaggaaatctggaattctgctgtcacatcactttccctaaatccgtcttcaatatttccttttctaaccttatccacgtttgcgatatttgtcttcggaaccgggaatacaccttttgtcttctcatagcggtccgcatgttcatgaacgagcggcgcatccttttgaaaggcctcacggggggaattgacgacgggaagaggtttataggatactttgatggcatccgcggcccttttagctgtaatcggattttccgcaacaacaacagcaaccggctcaccatggtatctgacccttttataagcaatcggcgatctgtctttaatttcttcacctgcaagcggaaaaggttcatcccccaatatcgctctcacgccgggaatcttccaagcttctgaaaagtccatcgacacaatatcggcatgagcatatggactggtcagcatttttgcgtgcaacgtccctgtttcttgaaaatcatccgtatatttcgctttacccgtcactttttcaagggcctctttccgaatgacactcttcccgatatactccaactcattcactccccgaatttattcagcagcagcgtataatcttcaactgtatcgacgtcataaaaaagcaaagggtcttgaaagctgatcatttttcccatattgatcatactttcacggatcacatgccgggcgccctgatctccctttaactgatgcaataccgggaaacattgatttgagaataaaatgggggcataggaagatgctgattttcagcggcgataaatgaataacggcgctctttttgataggaatcaattaacgtattgatgatatctgcggtgacaaacggctgatctgcaaggagaatgataacggcgtcagcctcgtacgctgccgctttttgcaaaccgcattgtatagaatggccttggcccttacccgcttgctcacattctgcctggctccacttatttgacatgggatctaaaaagaaaaaatccgaaagccaatgcagtgaatctccctttctcgtaataacaaaaatatgatctaattcagataacaaggcatttttaagagccatacttccgagggaaacgccattgagaaataaacttcgcttatccgttcccatgcgtctgcttgtaccggctgccaggtaaatgcctgctgttttcataggcgagacctttgttttcgcattttttgaatcatctcgccgacaatgcttacagcaatctcttcagggccttgtgccccgatgggaagtccgataggggaatgtatatcttccggaatctcacccccgcctaaaagccgctccgtacgccttctggggcctaatacgcctttataaaacacattctcgttttttaatgtatgtaaaatgatctgatctttttgaaagctgtgcgtcataatgacaacaaaatccctttttgtcatgctcaggcctttcatgacttcttcaggcgctcccgttatcaaatggccggcttcaggaaaatggccgtgatgacataaggcgggacgccagtcaatcaccgtcacatgaaagcccgcacgagccgccaacgaaactaacggcctcgcatcttctcctgctccgaagacatataaacaaggttttggcaccatctgatggataaaaaacaaatcagatgtatgttcatcccttttgattcccttctccgtctgtctcagtttttgaatacggccttgttccatcacatccccggttccaaacacgctgccgtcttcagcgatatacagatcttccttcggctctaacgtttcagtgaatcgcttcattcgggtcacagactttttttcatctaagcatgtcttgactgtcatcagatgccgttccaattccccttttacaggctcaagcaacaccgtcaaaacaccattacagccaatgccctgtccccaggataaatcgtcttccgcactcatatcaaagcggacaatcaacggttctcccgcagaccagacctgttctgccctttcaacgagatcttcttccagacaaccggcggataacattccgactcttgttttatcctctaaaatcaacatcgaagccccttctttcttataagcggacccctctgtttgaatgatggtagccagtaccttagctttcttagaattagcgatgacatccaaaatccggtgtatatcatccatctcatgtcccccgcttttacctgatcatatctgtatatccgtattctctttttccagaaaacattacaaacgcttcagcaatttcttcgtttctaaaaaaaaagagtctttatagaccttatgaccgggcggcgggtgcgacagcatgtcggagcggagagattccaataacacgttctgttccttctgtttccgattgtctgtttcaccctgctgtatgcctttaagatccgaaaagtattcacttaacacttgtaaatcattccccagctcccttttatcacttgaagataaagctccttctttttcccattcttttaacgttttcactatatttgacagatactcaaatccggcgttcaacttttgcatctctatttgatagcttgaaatgatgtttttatgtttttttctgacggggttgaattttaagctgtcagaggctgtttgcagcatctcttttgccgtatgcagctcctgcagaagatggttcattttatattccataaggttcccttttccttgtccccactctgattgcacccatttggaaaggtctgaaagtgcgtcggaaagctgacgggccaatgtttgaaaagagtccgctgccttttttgtgtagtccggcggaaaaaggaacatgtgaatcagaatggcgatgatgacgccgatcaccgtatcgatgattcggtcgaatgcataatctttagagtttcgttcaaacgtaaagaccaataaaatggtgagcgctacctgatgcagaaccgttacatctattcgtaaccactttgcaatgtaagtcccgcctaataggaacagccccagcatccagccattcattggcaagtgactgacaagaaaggacgttagcatgatcccaatcgcagttcccgcaatacgatgaaaagaaaaacgaatcgactgatctatcgttggctgcaaacataagataacagacagaggcgctaaataggggtgatcagagcccgccagttttgccgcttcccaagaaaccgcagaggcaatcgccatcttccaaaccaaagatgttttgttttgaattttttcacttttcatcatacgccccctcctttcagaaaccttttccactaggtttccgtgacggaaagggatttatactgtcgtgtggaaaatgcggaagaagctgttgttcgcaataaaggtgcttctctgagctcttctttacggtttctatcctccttgataacttcgcatcagatatgaaccctgctctcctatgactttcgaagggaaacatacaaaccttgttggttaatgtgatgaaattgggtgaattttttatcattttatatggtaaggctttaacaagcagaatgcctttgttagtatggcaaccaaaggaggaggatcaattatgcaaagcagaatgaagctaaccgcagtgaaactggcagccttggtattcctagcaggtgcctttgccctcccggttttacctcatgctgcggctgccgcaggttcccaagctacatacaaagttgaaaacctcaacgacagtgagctgaagatgacgttcaatcatgcagatgttcatattgacgctaaaggcaatgcaaccctaaaagacaacataacgggcgaggagcaggctcttccgaaaagctctactgacaaaaatggtgaccccgttacactgaaatatgaaaaaatcaaaaatggcgttttagtcaaagtcgtaaacaaagacgctggaaaaacaagcgggtcaatcagcacccaatcagtcgggaaatgtattctaggtactggcggcggtgcggtaactggcggcggcacactgggtcttgcaggagctgctgtaggaacagtcacaatacccggcatcggaacagtaggagcgggtgccgtcggagcaattaccggcgctgttggcggtgcaatgacgggagctgccgcatcttgcttttaatcatgaaaaaaaaagggcccgcgcccctttcttttactaactatggaaggtggtcgacatgtacaaaatcatcattccttcaatactagccatcttcattctctggatactcttacagatttcgctggagataagtatcgttaagaatccattgaattattttattgtattcattgtcttctttctctttataaagatggtgaaagagaagcaacagtaggttgcttctaatcagctgtggggaaccagattttagtggatctggtttttttgttttgttcactataagccaacaagtgatttcatagtaaatcgaatattgacaacaaatcggcctgctatacaagataatcgggacttatgatcttggtttaccgagtctttatataaaaagtattttcctttgacataagagcatccgattgattaaactcaaggctttatctccctagaaatatttagccgtcacagtttactgcgatatgggtattattttcttgtacggttagtagaataatcactttaaattcacttttagcaaatgcatttatataacttccccgcaaaggaataataatgtgtttatcctattgcctatacagcacagagggattaacaaaaccagcgttttatacctaggtctgttaacatgctatataaaataacataaaaattaaatgtaaaataatatagagaggctccaattaattcattatgtcattcaactcagagaattcatcttgcagaattctaaaaccttcgttaatattcttttcatatattaatcgtcttttatttgtggattcctgagaatagaaagaaagatctatttctactccttcatttttaaagagctcagcacttgagatttttgtgaatggtattaactgacccgttctaatatcttgtaaaacccctttaatttcaaataaagttaaaagctctctcaagtttttgtcgtgggataagaaaaatggtataaaatatcttccttcactattcaagttagagaaatattccattaccctcggagccataaaatcccaagctgtgttttcaattttttcgagtaattttttttgattaccacctttattaattttattaaatatcccaacagatttaggattcttgaaatatttaagcgcaataaccatttctctttcataataaattcctactttattttggacatattcaagtaacttaatcattttattttttgcatttttttttgaactgaactgtattttgataattccgatcagaagtaatgttaaattctgatgcatatctaagaacttctttaatgaacttttaccatccctagttttatataatttatatattatatcgtctactctttggatagcctcaaacttcgaaatttggtattcaataatattcttatttatgtatatatcattatcaatgcttttaaatagctctaaaaatactaaattctcgtacatatccctatgtttttttatagaagcatcaaaactcccattatctttaataattttattataattttctactaaatagaaattataatcataatgaaatttatgttttagtagagtatctatagttttgtaaatactttctttctcaaattcactactcccttgattgttcaaaaagcgaggaatataactagcataattagtatctaacatcacagaatagtcaataggaaatgatatacttccattaaataacatatcattcagtaattcatcatccatgtaatataactttccggtttgaaagtaagaaataaagtcttgatcaactgcatttaccaattctcccaatccaaccgggaaagtatctttatcataattatctaggtttatactcaacttaaagtattttaaatgttccttgtgcttattccatactaaaaatacttcccttggtgtttctgccgttgataaaaaataaatcacctttcttaaaatcatttcttctttcatgtatttactccttaataatttgttttcaaatttgaaagtaaattatttgattcacatttattatctctttttttctaaacaagtttattgagtaatattaattgctctagtctgtatatatttttgtgcttctgtcctaaccaaataatgattatctatggaagctttcttcaatattaaattattaactttggaatctataattgctaatttttcaaagtttcctattataagattttttatatatacattttcataatccatagattgtgaaagctgagtcagtataactttttgagttttggttgttatcatttttagcaatgctttaattgataaataccgtatatcttgatttttgtcattcttcaaacttaaagtgaattgaataatgatactacgaatatctgattctatatttttaaatgattcattatttatagcatttataatggcctttaagcattggattttttcaaactcatcctcattattaatttcacttaatagatttaataaatcaacattatctagttggcaacataccattttaagcataaaataattaatctttacggttaatgtcgaatatttttgaaaaagatcatcttttccttcaaagagatggttttcgtgtttaatcaaatattgatataaatctttaaaattataatcaatattttggaaattctgtttaatataaatagttaattgtaaagcactcaccttatcagaatacagtagattagttgcacataacgattcattacatacttgaagaacttcatttaatagatagttatcaactatttcacaaccctctttaatgatattttggattattagatatgggttttgcgctttcacactgtaaatcccatttttaccttgtttctcaatttgttccttgatctcctgaacataactcataatatggctttctcttttgacactagatgtttctaaattataaattttgcgatctgattcagacatgttacttaatacaacttgatttaattccgaagtacccgctattatctgttttcttaaatttataattgcatataagaggttatgacactggtttgctagattagaatctaaaatgattcctttcaacaaattctttattttttcaaggttttgagtagatatccctttaaaacttattattcctatcaaatttaaagcatcatcataaaagcgaaacatctttttttctaaaatttttatgcatactctagatatttcatcggcttcgattctattgatattttctttcaaagaatcaaatattaattttcccatagacactataaaagtattatcaatataattatgaatctcttccaataactctcttttgatacacatgtaatcttcatcgctaaaataataccctaaatgtttaaatacttctagcttagattttattctttctgattttaccgggaggcagtttgtaaaattataaatattttttacatcaatataattgatttttcctaatatgctattaaagtaggaaattatattttctgtttgcttgctatctccaactattactgccatttttaacagcaacactctgaattcccaattggaatattcctcacataattgaaatgatatatcttttattttatttctcaataataataattgagttaaagatccattaaaggcaccaacaatataaatgttagtcaaatatttaatataaacatctaaattactaccaaggttaacagtatacacagtttcagttttcttttttgttgatgctttattaatttctttatataatagcttttcatatctatcaattgatgggtaaaacagagattgacgcatactttctaactcttcttgtgcagcattcctagaggagaatttattttcctgatttaacttttgattttctatatttattaaatctatcagtatatcctgtgaaatccaatcaggcaacccactttccttacataagtcaaaagcttcctttaagtattttaatacagaatcaaaatcatcgagccagtaaaactgaatagctttccatcttaattttactactagatgcatattatcactttgctctttttttatttgctctaaaaataaatccccattgaattcttcaatacttttttcaccaaataatacttttagaaattgctcataaaatctatctaattcactcgtttctttcacttctttattaacagaaaatatcttttttccgatatatgcttttgatttatcaattccttgtaaaatacgtttctctagtgattcagaagctattgaacctatttctattttattctgttcagaattgtgaaattcttggtctatgagtctatttttacaatagtgtctataaatattacatatgtctgttattaaatctttaaatccttgatttgcaaattcattaaaactattaactatataatatttagctccttttgctccaataagttcttcttggatttgcgtaggtttactttctttttcattacaaaatagatatattgacttttttgggtgtgatttggctctagttatttctctaacaattgcagatgtaacatcatctttattatctattaagaatagacatacatcactatcatctagggcatataaataatcctgttctgcggactgtgtcgaagctccactttcctcaaatagatatacatcagcaatctttgtcgattcgataagtttttttagttgttttcttacttcatcatacctttcaaaaccttgtccacaccttgaacttataaaaactttaattttattaggtaacaaaatgtcattcttcaaatttcaacaccctctatagattatatttctattgtaataaacgttaattaaatgacgacttaaataatataaaatttatcatagtctctatctaagtgagatttgaatcatttttgattaaagtcttcgaaacatccctatggtaacaagcttaattaagactaatgacagttgagaattgatgtagctttatgtgaatttttttaaatctaatatagagttacttaagcataaaaaattaatagggaagctttatactccccctttactcttatctctataatattagtcttccttaccttgaaccatattaagtccggctctgtatagaaatggtgtccaataaggtttatgactaccctttttttcctcaaaaaatccaatagacactaattcatttgcaatatttattgtatcttctttgtttattagaaatatttttgaaagggtaccaacatcatgttcagttttctggtcttcaagtttttctatgtatttttttagatgtgcatattctgcataaattgtttgctctaaacgaattttggatactacttttaatgcgtccttcaaagcacttcgtcctatgatttctgaataagagttttctggagtaccagtttctaacaatttaatttgttttgccctagcctcattcattaaatgaatgagttctcttggagctgttatttttaatccatccttaacccgtccaatcatccatttaaatgtttcaggattctttcctacttcaacttttttcgggaaaatagaatagaatatttttttctgcttgtcactatcttttaatacatcatctttttccacattaaaaaatttgcaaagaatatcgttttcaagaatacgactaaccagtaaatgtaaaaaatcctgttctgaccaatcaatcgtcacttgctttgttatatgacttgcctccctaaaacccgttttagtaattcgtttccaaatatcctctctaataaagatttttaattttatatgtttgtgcagttttatattattgtaaacctgaaaaagtgttcttagagctaaggtttcaaattcaggttttccgggaaatgctacatcaagtctatcaaatgttatccaaacgcttaagtcaacacttttaagtgcctcattagccatttcaagaagttcaaaaattgatatagctcctaattctctatgttctttacttggttcatttaaagagattttcccttttaaaataggtatattagttgtaggttctacggttactactccttcaacttcttttacatttctaaagaattcaaaaacataatctctaacattcgtaaggagacgtcttatccctttaccttctaataaaccttctaattcaagtcttctaataaaatcttttacttcttcgcttctattacgaaaatctttgattttatcacctatcagagtaatgatatagatagaccataggtactgaaacgaggtttcagttaaatcagcatcaccaagaacagatttaaaaacaggtgtgccctctaggttttctgcaggtattaataaggtgtttttcgcagcaaaactaccctctttttttaataattgcatatataatgcacttttacctgaacctttcactcctcggactacatcaatttcccccatcaacaattgattccatactgccgtttcaacaaaatacgatgctaaattctcatcctcttcggctaccctctccccgaaacgcgagttcataagtaaatctatttttctttccaaaatggtcatcctttcattcataatatttccatatgaatatattataacaaaatatgatccttaacgattatttttatgctgaatacatcaagaaaatggtatttgcaaacctcactcacttatgataaggctccccacgattaatccgaaacgcccggtaaatctgctcaactagtatgagccgcatgagctgatgaggaaatgtcatttttgagaatgacagtttgtcgtctgcgcgcttcatgacggcgtcgcttaggccgagtgagccgccgatgacgaaggtgattttgctttttccataagtcgccagcttatctattgtatcggccagttcttcggatgttttcatttttccttcgatggcgagggcgatgacgtgggtgtccgggctgattttggccaggatgcgttcgccttctttgtctttgacgattttcatgtcttggtcgctcaggttttccggcgctttttcgtccgggagttcgatgatgtcgatttttgcgtaggctgagagtcgttttttgtattcttcaatgccttgcttgaggtatttttcttttagttttccgatggtcacaatattgatattcacaggtcatccccactttagaaacaagttattcatatatattgtccacaattgtggatatcttttctgtattttgtgtaggatcattcgttccctactagatatgttgcagtgtccccacataattcacaggctgtggataaactgttagtatgttcgatttttctgatttcgggcggaagctcatgatcatctatgtacatgtccagcacggtttcgatatgttcttcacaagaataataagcggttttcattgttacatcctccggttttcttttgcgcgcggcaattgttctcttttcaatataacctatttatacacatgttagtagtgcttcgggctgagttttatccacaattcggcaaatcacgcgcaaaaagagccggtgttttcagcatccggctctttacgtgttttctcttttttctaagcgaaggacgaacagaattcctaatagacacgccagcagcgtacagcatacatcaatccagtccggctttccgccgtttaaaaaagagttggttatcacggaaaccaggagaatggtgacggtcaccgcggcaagctttttcttcatcggctccctccttcatctgactgtcttctgcttttacggttcaaattcctctatttctttttcttgctatatagccttatcatgagggtcacaacgatatatacaatcataatcaatgccccgttactcacatcagggtatccaatcaacatattcattatgacaaaaacaatggttatacaaatgacggacaacaataagaagatactgaatgatttcaaatgaacaccttctttcccgcagtaacgtttcattataaaaagcttaccaaaagcggcaagctcttccgaaatgttcatactctttaaaacccatccatcacctgcacatcatacagcttgagatggcttttcggcgtgacgatgttttttaagtttgggatggtcaggtcgttcagctttttgcccgttttcaggtcgaaggattcgattttggcgggctttttgtagctgtacgtgaacagatacagctttccgttttgatgggtcagctccttgaagtcggccttcattcgtgatgcggggagggtgaaggcctttttgctttttccggtctcagggttgatgcggtagacggttccgaagccgtcaacgaaatagaagctgcgatgctccatgaaaaagctttttttgaagctgaacggcatggagtcatagatcgtctgttcgtcatttttataagcggcgatgtcatacgttttgatggcgccgctgtttttcatgactttcaccatttgatagatgtgatcggctttttctcctctggtaacaaagcagacagcgctgtcgtccacggcgagctgggattcgacagacgtgccttctttatacgtccacgtcgcgattgatgttgtatggagcttttctttatcggcctgaatgtcttggacgtgatagcctttttcgtcatctgtcggcgtgagcgcgaaaagatgatctttaaaaaagcctgaggcgcggatatagtgcgggatgacgtcttgcttccacctgccgtccatctggcggtacagctctgagcgatagctgccgccgctcttgtcgtagcccgaattatacagcgtgtaaaagcctttcgcccgttcgatatatcccgcgctgtctcccgtatgctggtacgctcttttatacgtgtgaaggccgtcctgaacggtgtagattccttttttgtcctccagcagcacgctttcgtcatgcactttggccgatccgagctcaagccccttcatttgataagaagaaagccgccctttttcatcggcgaagagggcgtagctttttccgccgccgaacgtgtcttggtcagccgcagtggagaaatacagcaacgcctctttatctttcagaaaatcagggtcatttaatgtgtctctcgcaacctccgcagggtcttccgtgcggaaatagaagaagcataagaccgctgcggcggcgatgatcactaagggtatccagatgatttttttcacgttgttctccttagtgaatggtcaggatcgtggttgtgtaggacgagcttgtgatgtcgcgcgggtatacgcctaagccgccgttagagtcgatatcaatccccgcttttaaaaggaatgccgaccacagcagttttgagcagtttttggcgccttcatggcccgtatttctgttattgacgaagttgaaggagtactcatcacccactcttgatacggcccagtcagcggcggcttgtttttgagcatcggtaactttcacggtctggacgattgaattgtcttcgacttctctgccgttataagcaatctgacggacgccgtctcccggcacggattcgacaattttatcagcggatgaatacatgccgacatgcccgtgattgtaataagccgtgtatgagttcgtgtaataaatattgccttttgtgcttttcgggagttttttggttcctgacgatccgcccatcgcagagagtccgtctttggaagcgattacatttccttgcaccttgtctgccgtgatttcttgatgaaactgcttgagaattgcttctgttgaaacgtgcttctgtttggcaagctctttggcggattggagaacgtcttgaggagtcgtgccctgctgaaggtctgcgatttcttttgcgtagcgtggtatttctgtttctttcgcttttacattcaaaccggagaacgacagaaccatggtgaatgacagggcaaacgggaggacggctttgaacagctttttacacattgacttcgcctcttttctcaaaggttaatttttccacgttttcattatatgacgaaattgtgataaaaaaatatacaatttacagatttttaaaaattttataacaatatgtaaatcatatacataaatcattttcaaatatcaggaaatctggttatcatacaagaaagggggaggacatatgaaggacagaacgatcggttcgatgcgggtttccgcaatgggattagggtgcatgggcatgtcggaatactatggcagccagagtgaggaagagtcgatctccacactgcatcatgccgttcatctcggcgtgaatttgtttgatacggctgatcaatatggattgggtgcaaatgaagaacttgtcggcagagcgctcgccccattcagaaaggagctgtgcctcgcgacgaaattcggttatgtccgaagcgaaaagggtgagtttatcgaaatcaacggacggcccgattatgtgaaaaaagcgtgtgatgccagtctgaaacgccttgggacggattatatcgacctttattatctgcaccgggttgatccgcgggtgccgattgaagaaactgtcggcgccatgaagaagctgattgacgaaggaaaagtgaggtatatcggattgtcagaggcttccgcagaaacgatcaggcgcgccgtccgcattcacccgattgccgcgcttcaatcggaatattctttatggagcagggaagcagaggagcatgtgctgcccgcctgccgtgagctcggcatctcatttgtgccttacagtccgctcggcagaggttttctttccggaaagatgacgtcgacagatcagctggatgccgatgattacagaagaagaacgccgagattccagggagacaatttggcggtgaatatagggctcgtccaaaaatttaccgccattgcccgggaaatgaatatcaccgcgcctcagcttgcgctcgcatgggttctcgcaaacggcgatgacctcattccgattccgggtacaaaaaagaaacactacttggaagagaacctcgccgctctcgacattgtgcttccggaggatgtgaaggcgcggttggatgaaatgtttccgatcggcacggcggccggcgagcgttacccggaacaaatgatgacattgttagatgaataacaaaagaggcccatcgtgcgggcctcttttcatgacagctttttgctcataatgacatccgtctccaggaatcccgtcttctcatacagcttccgcgccgtttcgttatgagcgaacacatggagagaaatcttgcggacacccagatctttggctttgtcctccagccttgcgagcgcctcttttgcatagcctttgccgcggaaaggcggatgaaggccgaaatcataaataaatgcgtcctgctgcgggtggtccggatcggcgtgcagccacaaccagccggcattttcctttccgtccaatgtcagcgtccataaatagtgatcggctgtctccaagccgtctggaagcaggtcttcaaacgtcagctccgctaattccggcgcttcgtcaggcagccacgttcccgcttttaccttttcttcagcgtaatgcttggttgaatgagcgagataggactgaaactcttgtcctgtcatcggctgcagcgtgatagccattgaatcactccttacacgaaagcgatatcatgcagtattatccgaaggctccgttttccgccggttttatgatttgttcggcttgtgccgttgaaccagtttgtgcaaataatccaatcgaaatgagacttgccaaggctgctgagagtacaatgaatttacatgttttcattacgaatcccctccgttaatctcaaaatttggtcattggcatcaattgattcctgaaaatacttcgccgccggtttgtatttctcctgttttttaaaatgcgccgcggcctgatacgacaaatcggaaacgtcactccacagctctttccttcttaactcggcgaaagctgattcaagcgcttcttcattgcggtcaataaagacatgctgtaagatgcgcagcttttgggtgtatacgggctcgtttttttcttcagcggcattcagcgctttatgcagccaaaatcggccctcatccgtctttgcctgcttcaataacactctggccagcatgtacagactccgcaccgaatacgctgatcgcaaatgctccttttgatcaagagccgtttcaaactcgacccgcgcctcttccagtttttcctgtctttcatagcaaatgcctgcgttaaagtgggcgagcgcttcaatatgcggatcgcccgctttggcggcttgatgaaccgccgtctgcaggagctcttcggctttctgatagtggaacaagtccattctgttacagccgatcaccattaaacactgtgcttctctgaccgcgtacatttcattggctttgtagatctccaacgctttttccgcgtggttcatcgcaaagtagttttggcggatttcatagtaggcaatcgccacttgataattaaactcggctctttcaatctcattcggtatgtgccggagcctgctttcagcaatccggtaaaaattaatggcgttcataaaccgtttacggtaaaactcgtgcattccggaaaagaaataataatagtattgaatcatctggtctgttttttctttatcggcgttcagctggatcgtttttaaaatgccgtctgttttctcatactcttccattaaaagcttatagcgggaatcaattaaattaaaataaaggagcaccgtttgattttgtgtcatattttgcagatccgtaagcagttgttctcttaacgcctcagccgattcagtgttgtgctttttgatttcctcataccagtcactgatttttttcgcaactgtttcgtgggccatcacctcagccatctgtcaggacacctccctttcccattttgtgtaataaatatatcatatttacaggtccaaaaagagggtggcagcccgctagtttcctcgtggcaacaaaaaaaacctccgcaggtgcggaggcgcatattttataatagtttttttcctaacaaagattctaccagctcgaccgctgttttgccggttttgtttttgtgatcgaggatcgggttgacttcgacaaattcagctgaagtgatgatgtcggcatcatacagcatttccattgccaaatggctttcacggtagctgatgccgccgacgacaggcgtgcctacgccgggtgcgtcgctcggatcaaggccgtctagatcaaggctgaggtgaacgccgtcacagtctgacaggtagtcaatggtttcttcaatgacctttgtcatgccgaggcggtcaatctcatgcatcgtatagactttcatgcctgtttccttaatgtattcacgctcgccttcatcaagcgatctcgcgccgatgatgacgacgttctccggcttgattttcggggcatacccgcccagattcaccaacgtgtcgtgcccgacgccgaggctgacggccagcggcattccgtgaatattgcctgacggcgatgtttccagggtgtttaagtcgccgtgcgcgtcgtaccagatgacgccgagctgtttatagtgctttgccgttcctgtcagcgttccgatcgcgatgctgtgatcgccgcccaagacgagagggaaccgctcattctcaatgacgctgtccaccttttgggcgagctgctcgttccccgagagcacagagttcaaatttttcagctcttcatcatgtttgagtttttcacgattgacggggatgtcgcctaagtcttccaccgcataccccatgtcagataaccgttcaatgagatgcgcgtagcggatggcgctcgggcccatgtccactccgcgtcgtgcttgtcctaaatccatcggcattccaataactgagatattcttgttcatccgtttttccacctcaacatgttgtatgttgtcctgtgcgggtttctcaaagatgacttggacacgaaaagatttaaagctctatctgtttttctgactgcttatgcttttttacatacagatgatagacgataacgcacaccgccatgaacgggatgccgcaataaagggcgagccgctgttctgaatcaaatgcgagactgatcagaacgaccgtatttaacgtcagcccgataataggcagcaccgggtacagcggtgttttaaacttcaggtcttccactttgccgccttcgcggatgtatttccgtctgaacatcagctgtgacagggaaatcgtaatccagccgacctgcgcgcttagtccggctaatgataagagaaacatataaacggtttccggcgctgccactttagacagcagggacaggcaggcgacggccagcgtcacgatcagagcgttcatcggcacgccgcgtttagttgttttgccgagcgatttaaaggcttgtccttcgttcgccatggcatataagatacgcgtcgatgcaaacaggcctgagttggccactgagagcagcgcaattaagataacaaagttcataatatcggccgcatatggaataccgatttgttcaaacaccacgacaaacgggctttcgaccactcccgccttcttccacggaatcatgccggcaatgacgatgatggagagaacgaaaaagacaagcgttctccataccgtctgccggatagagcgcggaatcgttttctcgggattttcactttctcccgcggcaaccccgatcagctccgttccctggaacgcgaagtttacggtaatcatcgtaataagcatagccttaatgccgttcggaaacaatccatcctcataaaaatgagagaagaaaggagcctgctcgccgtgtttcatgtcgatcaggccgaacatggcggcaccgcccaaaataataaacagcagaatgactaaaattttaatgccggaaaaccaaaattccgactcagcgaacgcttttgtggtaatcgcgttcaaaagaaacatcagtccgacaaacacgaggcaccacacccatacgggaacatgcggaaaccagcggagcatcaattgtcccgcagataaaaactcaatggcgcatgtcaccgcccagccgagccagtacagccagccgaatgcgaaaccgaaagcggggctgatgaatttggttgcgtacgtctgaaacgaccctgatacgggaagggcaaccgcaagctcgcctaagcagagcattgtcaaaaacataataaaaccgccgaccagataagacagaaccgcgcccagcggtcccgcctggttaattgtaaatccggtactcaggaaaaacccggtgccgatcactccgcctaatgaaatcataaacaaatggcgcgatttcattgtgcgctgaagctgattctctttttgatttgtattcactattctgcaccccttcagcaacttgtattggaaccaagccggtgctttgaaaccgatttgctgtccaaagagcctctatttgtatatgaatgttatatgaaattcattttcgtacataaagatacattatactaaaatactgtctccgcgcaaatagagtgtgctgaattttttatttgtaaattccatacaagccgagggaaagcattgccgcatcaaggtattacgcgttttgaagcacgtttgtgatcttttggatcgcccagtccaagtcttccttggaaatcattaacggcggtgcaaaacggatcacggtatcatgtgtttctttgcataaaagcccttcgcctttcagcttttcacagtacgggcgggccgcttctgtcagttcaacaccgataaacaggccgcgtccgcgcacgtcttttatgatcgggttatcaattttctcaagctcttctttaaaataccggccaagctgaagggaacgctctgccagcccttcttcctcaaggacttcaagagatgcgagcgataccgcgcaagcgagcgggtttccgccgaatgtcgagccgtgggaacccgggttaaacacgccgagaatgtcacggttcgccgcgatgcacgaaatcgggaagacgcccccgccgagcgctttgcctaagatgaacatatccggtacgatattttcccaatcaaccgcgaatgttttccctgtgcggccgagtcccgtctgaatttcatcagcgatcagaagcacattttcttccttacaaatagcggccgcttcttgtaaaaatccttccggcggaatgacgatgcccgcttctccctgaatcggttcgaataagaaagcggctgtgttcggcgtgatcgcccggcgcagcgcttctgcgtccccgtatggaattaattttatacccggaagcataggtccgaaaccgcgtttatactcatcttctgaagaaagggataccgcaagcatcgttctgccgtggaagttgccgatacacgcaatgatttccgcctgattatccgctactcctttgacctcatatgcccagcgtctcgccgctttgacagcggattcaacggcttccgcccccgtattcatcggcagaatcatatcttttccggtcagcttggctgttttctcataaaacgggccgagctgatcattatggaacgcgcgtgacgtcagagtgattttatccgcctgatccttcagcgcctgaatgatcttcggatgtctgtgcccctggttcaccgcggaataagcactcagcatatccatatattgattgccttcagggtcttttacccaaacaccctgcgcttcggaaataacaatcggcagaggatgatagttgttcgcgccgtaatgtgaagtttgactgataatttcttgagattttgtgaaagctgacataatctgattcccccttgttttgtaatcattcaacattagatcttgctttccctttttataaagcaagttccgtgccaatccgaaaaaacgggatgtttcgccagcattctttcttttcctgcaaaatattccggcagtttgcgtgcaaacttcagccaagcgcaaaatttttttgcgtttcctgttcgatttattttaaaataatgaatgttaagacgattgagagggggaattgacctgcacacaaccagcgaattttacacactcgtgttacaaagcattctggaagagattgatgtcgggctgcatgtggtggatgagaagggcagcaccgtcatttacaataagaaaatgatgcagattgaagatatggatgaacgggacgtcctgcataaaaacctgactgatgtatttatgttttccaatcagcaggacagcacgctcgttcaggcccttcaagaaggcaaaacgattaaaaatgtaaagcagagctatttcaataacaaaggccaggaaatcacgacgatcaaccacaccttcccgattgtgcaaaacggcgagatcaagggcgccgtggaaatcgccaaggacgtcaccaagctcgaacggctgatcagggagaacatgcacagaaaagaacagaacagctacacgtttgacagcattctcggcaacagcccggtcattcaggaagtcatcgaaaacgcgaaacgggcaacccgtacatcatcgtccgtgcttttggccggcgagacgggaacaggcaaggagctgttcgcccaaagcattcacaacggcagccagcgctcaggcgccccgttcatctcacaaaactgcgccgccctgccggacagtctggtcgaaagtattttattcggcacgaaaaaaggcgcctttaccggagccatcgaccagcccggcttatttgagcaggcgcagggaggcaccctgctcctcgatgagatcaactctctcaatctcagcctgcaggcaaaactgctccgcgcccttcaggaaaagaaaatcaggcgcatcggatcagctcaggacaaaccgattgacgtccgtatcatcgccacgatgaatgaagacccgatcaccgccatttcagaagagcggctgcgcaaagatttatactaccgcttaagcgttgtcacgctgatcattcccccgctccgggagcgcaaggaagacattctgcctctggccgaagtgtttattcagaaaaacaaccacctgtttcaaatgcatgtcgattcgatcagtgacgatgtgcagcaatttttcctggagtatgactggccgggcaacatccgcgagcttgaacatatgattgaaggcgccatgaactttatgacggatgaaacgacgattacggcggcccacctgccttaccaataccggatgaaaatcaaacccgctgacacggaaagcaaagcagccgcaagcacccagcccggcacagatttaaaagacaaaatggaaaacttcgaaaaatacatgatcgaaaaaaccctgagaaaacaaggcaataacatatccaaaacggcaaacgagctcggaatcagcaggcagagcctgcaataccgcctgaaaaaattcggtctggaccggatgaaatgaatccatacaaaaaaaggctgaggtgctcctcagcctttcgtttatatctgattggcaagccgctctccggtaaaccaaaagttctcactcactgccaatgtatgttccgtattctcgacttgatgccaccaatggcgcggcgcgtaaatgatttctcccgccttttgcctgaagcggatcggagacgccttttgcgccagcggtttttgctctatatctttttcatcaaagacattgatatttccttcgtacaaatacggagagtcgtccggatgatagaaaatccattccttctccccgaaaatgacgccgttccacgcgtgcgtgctgttaaaatcctgatgcagcggcgtgcctgtctgcttagaaccgagaaagaaccatttccagtcccgtcccgtttcttcatccgctctcaatgtgtcttttgtaaaatactcgggtgcggaatagacaaggtctaagtcattttggttcagctgcgtaaaattccagtcacagtaccatttgtcatcattctgatcaatgtactcgatatagttggaaagctttacttgtttaaacgttttgaccccttcgatatctgatttccggatggtgaccattctgtctccatagtgttcgtcaatgtattcaagcgtccacggcctgcattcccagtgatccattgcccccgtcaaaataaaaggtttcttatcagcatactcgcttacaaaaagatcgtacgataactcattgattgtcagtctgtcaatggtcatatccattccccttttattcggcaatctgccgttttttttgtttggcgtaactgtatggacctgaaaagatggtgacgttttgattctcaagccagaaaatcttgttgaacttctccagcaggtttctgtcgtgagaaacgcagatgatggtgccttgaaactgcatcaggctgttttcgagaatttcctgagattcaatatccaagtggttggtcggctcatccaggatcaggacattcagctttttttccattaagatggacagcttcagcctgattctctcaccgcccgacaggacggaaagttttttaaagaccgacgacccgtaaaatccgtacttggccagcatattccgggccatgccctcttcagtcagcagattttctttaaagaattgcagaatcgtctgactcgaatctccgacgtggctcttttgatcaatgtagcctatcttaagattttcccctactttaatggtgccgtccgacagttctctttccccgatgatgcagcggatcagcgttgttttgccgacgccgtttctgccgacgatgccgattctgtctttatgctttatacgcagattcacattttgatataaaagggaagatccgttggccacctttccgttttcaatgaacacaatatcttttgaaccggcgcccgcttcctgaaatgcgttttttaatttttgctccgtccggaccggcttattgatcagctcgatccttttcagcgccttttccatattattcgcgcgtctgtgcagcccgacagacggcggattcgagcggttggcccaatctctcagctgggcgatggattccttcatcttctgtatttttctctgctgttcttcatatttctcaaactgggcgatgatgaattcttcccgctttttcaggtattcgctgaaaccgtaaggccaaatcttcacctcggtatcgtcaatctcgagcactttcatcgccgtctggtcggcaaacgttttatcgtgggtcgtaaacagaatggttttattcgattttttaataaacccttcaagccactcaatcgcatgaacatccaaatggttggtcggctcgtccagcagtataatgtcgtcgttgcggattaaaatttcggcaaggccggcttttgttttttcgccgccgctcagctttgaaaacggctgatcctttaattcgctgaggctgagcccgttgcatacctcgtcaatcatcgcatgcatctggtagccgttgttccgctcaaatgtttccgtgtattgactgtacttttccaataaagcagtcagctcgtcctcacccatcggttccgaaagcttcagctcaatggccttcatttccttctggatcgccgcgagagcttcaaacgatttttccagatattgatacaacgtcagatcctcatggggatcagcgatctgcttcagcaaaccgaccttcgcccctttgttgatcgcaatcgttccttcatccgcctcaagctcccctgaaagcaccctgaacagcgtgcttttgccggaaccgttcggcccggccacaagcactttttcgccttcattgatgaagaaagaaacttgtttgaaaatggtatctcccgctaaatttaccgtaagattatgaatattcagcaactcacatcatccctttgtcattctggttcaaagctcgactttattctggatggcgacgctcgctttcagtttgtaaaagctgagcatcataaacagcgacaataagatggataataccccgattgcggtcagcagcaaagctgaatcaaaatagtccgttaagaatccgataaacggaaaggcaatgaacatgaagagcgaggtcatcaaactgataatggacagcagcgtggctctcgttctggacggaatctcattattcaccacctgactggatacgggttctatcacatcatagagcgcgttgatgacaacaaaagctgcaatcgtcacgtacagactgcccgaaggtataaacagataggccgccccgatgatgcagaatgtcagcagaagcacgcgcctcggcgtgaatttttccgccggctttgaagaaaagatggagcacagtgcctgcaagatggacagccccgcaaaaataatggatatattgcgcacggacagcccttcctgacttaacagatcttgtccgtacatataaaaaaccgatgtaatcgcaaagaaaacggagagtgacagcaccaaatatttaaaggctttgttcagcctgaagaaatctttgacttcttttaagatgtccccgaccgtctgcgtttcgtgttcactgttttcaaatttgatctccgtcagctgtgtaatgaccgccatcgcaatcagctgagtcacaatcccggcgataaacacatacgaccatgatatttcctgcaagtagccgccgatgcccatggcgatcgcaagaccgagtatgacaagtccgttataatttccgatggatttgccgtaccacttttctttcccttgttctttcagtgaatcaaacaaaaaggcgtgatccgttcctgatataaacgtcagcccgataccgtatataatatgagcgatgaagagggcgatgaagttatggaagctcaggaacatcaccaaatagacaatgaccataaaatgaccgagcaagagcgatttttttctcccgattctgtccgagatgacgccgctcggcacttccgccagaaacatcgccaaattcaggaccgattgcaggatgcccactagaaacaatgaataattcatgcttgttaaatataaaatccaaattccccgttcgaaaaagaagtttccgaaaaaaccggagaagtaaagcaaatttcgattccgcaaatgaatacccctttccagctatctgcatttaacatcatgaacagaaaggagcccgtcagtctttacactaaaaccctctatacatggatcttgcagatacagacttttcccaaaacaaattgggcaataatgagttgtattctcgaataacccaaaaagttccttctttttttcagatcctatggcatcaatgatcgtttttttcttccccggatcgctgatgtcgcgaatgaaatatttgatatagctcagctcatgcatgtaagccggcaggaacaaatgaagctcaatatcaaacccgcttttatccatatggtaataatcattgaaatgactgacgcgggagacggatacgtccgctccggccctccgaaacaattcagtcagcctttcaatgatctctccgttgggataataatcggcataaacaattcggatcggctcttcttttgtcaaaaggggcggatctttctgcggtgtccgtccgctttcccatataccgatcagtgaatcagtcggtgtgatgatatgccccaaatcgccggccagcttttgtttatcaaaataatgctgaatgaaagttctcagcatgccgtcctttaccttgaaggtaaataacatcggcaaatgattttctttaaaatcagcatactgccgatacctcatgttggaatgatgaaactgggtgtggcaggtcacatcggtctgattcgcttcgtacagccagatgcttttttccagatcatcattcaaaataaattggatgatctgaacggtgcggtgatccgcgggcgtcattttatattgcggattccgctcaaattccagtcccttctcaaacgtacgcttgaatcggtacgggccattttccggcacatcgcccccggcggtcgccggaatcagaaagctgctctgcaaaacggcttctatttcatcagacggctcgtccaaggtgacttcaaagcgtttttcgcccgttacgttcaccccgagctgatcggatgagacgaggccttttacatacggaacggcctgttttatgttcaggaaactgccgagatggggactttggttttcttttgtcagatgatagatgatcgtttgaaccacaccctcggcgtcacctaaatagtccgggtgaatgtccacctgacaggtgcggcgatctttgcggatgattcggcagttatagccgtcctgcaggctttcatacataatgctgcaaatcatcttgcttgtgtaatcctgcgtatctaatgggttcaagcgtatcgggcttgtgtcgatttctattttcagagggtcgcccggttttctcgccgtacgatgcatcgtcttcataaagcgctttccttttgagaaagcttcgtttctgtaatatgaagtccgtcaaagtccaggccgatgcgggtattcagggatttcgggcttccgcctgcaaggtatgtgataatgtcatgagacataaacgaggatataataccgtttgtcgctcctaacgaacctttgatcggttcatcggggtaacagttcagaagtccggccggcatgtttttttcataggtgacgccggattgataggattcaggcgtgagcagaggcccccattggccgctgaagctgccgacacccccggtcataaacgcgatattccgctccttacaatactgataaacccattcagaaatgttatggggtttgtcagcggcatttatgacgatatcaatttcgtacggatctaacacacgcaggtcctgcggctgtgtcatttcctgatggtaaagtgctgcgtccgcatggggattgatacccgcgatataatctctgcattctgagatctttaatttgcctacagaagattgagtatagacgaattgtctgttcaggttatgtactgatacggcatcgaaatcaatgagaataaaatgctgcatgcccgccgccaaaaggttttgaagaatgatcgttccgacgccccccagacccacgatcgctgccctgctgccgtctaatctgttttggatcagattggggttttggttgtatttctcaaaatggtacagctgcttttcagtgatgcagccttcacggccgttttgccatggctctattaaagcatccaatttcattaacgcatcgaaaaactggtttcccgcttcctctcccagaagatcagaaagctcttgtttttcacagccggtgatcagccgttcaaccgcctctttgatctcactcgtatgcgcaagcttaatcgcctttcgatattgaatgataatatgccccgtgtaggtcagcacctgcacgctgtctttaaacttccagcgcttacagtccgttgacatcatgacataccccctgaaagataataactccccaaaaaggggagtcacggctttactagcagcgatgcaccaagcttgctgtttctgtatcaagatcaagttcttcaatcttcatcagtacacaccccctttgccaataactagatattatcatcaatattggaaaaggacaagttattttttgaaaatttagaatttatatataaattgtgatatttcttccgctatcccggtttatcccggcagccggatgatgaacacggagccttttccctgctcacttttcacttcaattgttccgttatggctgtcgataatggtttttgtaatggcaagacccagccccgcgccgccggattgacgggatcgggaggtttccgccctgtaaaaccggtcaaacacatgaggcacatgctccggagcgattcccgttccgttatccgcaatcataagcatgattcctccgtctttctgcagggagacggtgatgacacccgtgtcttcatccgtatgctgcaccgcattgtaaaagagattgagaatggcctgcttcattttgtctttgtcaaaaacagcttctatcttttgatcaacaaagaactcgagtttccggtttctcgcaagcagcttcagctcagcctccatttccaaaatgacgtctcccaatgccccttttttcatttcaaagctcggctcccggtcaatcttcgcgagaaacaaaagatcctctatcagcttattcgccctgacggattccgcgtacatgctttgaagcgctttttctttctgctccggcttttccgccgctccgcgcattaaaatttcgataaagccgtgaatggaggtaagcggcgttctcagctcatgtgatgcgtctgatacaaaccgccggatgcgctccttcgcttctttttccgcctgaaacgcggtttcaatccgttccagcatctgattgatggagatgcccaatgactcaatttcggcctgcttcctatcaatcggcagccgtttatcgagactgccggcatgaatgtcacccatcatatgcacaatgcgggacagcggcttgagtgtgagccggatcaccggcaaaaaaacaaacagtccgataaccaaagccgcaaaggaaagtatcgcgaaaatgctgatctggcggaaaagcgaatcattcagaggctgggtcagcgtgctcatctgtacaactcccgcctgccttccgtcaacggaaatcgcctgaaacacgacgatgatttcctcacccgccttattgtgagccacctgatagtgaagcgccattgtatctgtcagcgcatcccgatacacgtttttcgggaaagaaggagcggctcccgcgtgcgggtcttctgataaaactgacatcttgtatgattgattgataaaagcaaccgtcaccccgggataaatcacattcggatgagccggtgtttcggaacgggcaggggttttgattgacctccatacgctttgatccattgaattgatatcactctgaatgctgatcgcctgattttcatacatcgtccgtctcataaacatgtactgtgtaccgccgatgaaacataacagcaaggtcaaaatcgccagtgacctgaacaggagctggaaccgcagggttctgtacagccgtttcatgccaggtccaccctgtacccggcgccccgaaccgtgcgaatcaccttgtgttctttgtccttcagcttttcgcgcaaagaacgaatgtatgtctcgacgatattgtcttccccgagaaccgttccgtgatgaagccccatcgttaaagaatcaatgagtgcagactcgccgtctgcactcagcagcttgatgcctttcaacttattcatgatgcagtctctccttagatgtatcagcctgtgtttatttttttcgcttccccttctattattcgcttttatctgaaacaaaacggaagctaagctgaattggtgaaagtaaacgctgaaaacggagccatctgcaaataagctgccggcagtttcatctgccgctattcagcagcaccagtctgtttcaatcacaaagttctaaggtcatgtctgcctttttctacatatatccattttcaactgaacgtgttgtgacccgcgttcagttcttttttatagcttctgaaaaaaggcataaaaaaaagcgcccctgaaaaaggacgtttaatatgacatgtttcattttcttaaattctgcattctaaaataattcttccttcacattcaccctcgatttcattcaatacgatgatcacatcagccgttttcatgtgtttcacctccctgcttcacaatagtataatattaacaaataaatcaataaaaaacagcccggatgtccgggctgcttttttatttctgtaatcgatctgcttctgtcagtttgacttccgctgtttttttctttcccgaacggtagaacgtgatgttcacacggtcgccgatctttttgcgatacaggcgctcacggagatccacaacgtcattgaccttatgtccgtcgaacccggtaatcacgtcgagctttttcaaacccgcttttccggccggtgaaaacgcgtcgacacccataatgaccgccccggttttaacgcctttcggaagtttcagcgtctggctccaatggtagctcgcaatatccgttaaggatttcatctcaataccgaggaaaggccgtcggacttctccgtatttttctaaatcctgaataacgggaatgacaagctttgacgggatggacaggccgattccttcaacggcggattcagcgatcttcattgagttgatgccgaccaccttgcccgaaatatccatcaaagcgccgccgctgttgccgggattaatcgcggcgtcggtctgcagcacttccgcattccaatccggatgtccgtcgccgtttgagtcaacgggcaccgctctttccgtgcctgaaatgatcccctgtgtcactgatcccgcaaattcaagtccgagcggatttccgatcgcaatgaccggttctccgactttgacttgatcagaattgccgaactgggcggccgatttgattttatcagacttcaccttcagtaccgcgagatccatcagacggtcgctcccgatcagctcagcaggcacgcgcgaaccatccttcaggctgatctcaatctcagtcgcaccttcaatgacatggtgattggttacgatataagaagtgtttccgttctttttgtaaatgacgcccgacccgcttcccgcttcgccgccctctccccaaatatcagtcttttggatattgagaacgccgactaccgaatccgatacacggctgaccatattcgtgacagcgtcattgacatttacgttgactgttttcacctgttcgctgccgagacgccggctggtgcttttgctgctgtctccatggtctccgcctgtccagtacggcatcaggaaagccatgagcgcggccccgacgatgacgccgatcagacttgatagaaagtatcctctcttgctgcggcggggctgttcggaggcgtactgttcatcatcgcgattataatccaccctatctcaaatcctttcaagagtactcgatttgcttatagtgtgggtcagatcgcggattaataatcatgattcatttggaaaaattacacggcgcacagcggcgtcggaattttcggatcggtatcaaataactgaaacgtttccccggcgacaaatcctttcgcagccaatgtctgctgcacggacattctcgccagttccttcatattgttgtcttggctcagatgcgccaaatagatgcgcgatgtgccgtcgccgatgacatcagtcatggcgagcgccgcatcttcattcgagacgtggccgacatcgcttaaaatccgccgcttaatgctccaagggtatctgcccatttgcagcatgccgacgtcatggttgctttcaaacacaaacacattggccgaacggatgatgcctttcattctgtcgctcacatatccggtgtccgtcatcagcgcgagctttctgccttggtagtggaaaacataaaacatcggctcggccgcgtcatgagagacgccgaatgactcaacatcaagcccgccgaaagactttacgctttccatcgggaacaaaaacttttgtccggtatcaagcttgccgatctgattctccatcgctttccacgtcttttcattggcgtagacgggtagaccgtactttctcgcaattacgccgagccctttaatatggtcgctgtgctcgtgagtgacaaagatgccgtcgacgtcgtctatcttgcggccgattctctccatcagcccgtccatcgctttaccgctcaggccggcatccaccagaaaagaatgctcctctgtctccagataaaacgcgtttccggtactcccgctcgcaagcacgctaaattgcaagcccattgtgtctcactccattatttattttgattgttatcaatgactgtgctttccaatgcattcacagtgtacgtttgctgtgtctttttcttcgtcccttttgacttatcttcaattgtaattctccataccggcgccagcacctgcgtacttgtcagcgggtattgggcaatatagccgaacttgacgcttttaacggcgcaattcgcttttaagtaattttgagaatacaataattcgaccgcatcaagctcaggaatcaggctctcggtctggattcgcttgaatgactccagcatggtctgctcgtaggatacgacctggtttttatcgttcagatgcagaatcacctgtccgatcgcatccgtggacgagtcaaaatcctgataaataaactgtccgtcatatgtctggtaaaaaatgatctgtttttgatccttgtcgactttccacagtttatatttttcaccgccggttactttagaactgacgagcgattccgcatcctcctgcggtttttgcttcgataaaccgaccggatcggtaaatttcattttcagcgttgtgaccttatgatcatccgccggcatttccattaacggcttttgatccttcaaagcatcaatatcttcagcggtaaataccttttggcccgccgtcagccggtagcccgtcgcggaatcagaagacaggttgccgaatgtgatatggtccatctccatgtctttttccacgtttgaatttttaatcacttcgtattcactgctcgagcgtttttcaaaaaactgatagccgagaaaaatatcgaggatgaggaaggcaatgatgaagatcgtttttgtcttattccactccattatcgtcctcctccttccccagcagatctttcgtaatcgggacgatcttcccgttgatcttcatactccagacgggttccagttcaacgagatcattcgttgaagaagagaccatttgataggacaggaagatctggtcgattttgttcacgtcgtatttatcctgctgctccagcagagacacaacctcattgccgttcatcatttttacgtcttttgttttaatcggattcggcccgagaacatagttcggccgcttgtagctgagaacctcgtcattggcccattgcagggtcaaaacaggtccggatccgaaaggcttagacgtgctgttgatcacaggcatttggtctttaaacatgtagaaactcagctgctggttatcactcacattgaaaaattgataatgatccgtccagcttcccgtatcctctaaatatttatagcttttcttaatcagctcacccgtttggtaagaagcgctttgtgccaaattccgatgctggaattgaatctgccgctgtgtcgaattgatttccagacggctgattccgtcagtcagcacattccgattgtaattcgggtcctctctgaccgtgctcggatcattaaaaagcgtctgcttaaacaggttcgtcttaatggtttcagtgataaattctttttccttcatattaaaccgcgcattcggcatgagaaattctttgctttttccgaccgaatagaggtggtataacggcatactcgactttttgctgtacagctcattcatcagattgcggtaattcgccgattccacagtcacttccaaaatcagctgcttgctgtacgagaccatgtaaatcttcttattcgtcttattctcattaaacggaataacaatatggtcaaatgagctgtattccattgacggatttgaccatttaaacatcgattggaagaaatcaatcggaatggtgtcattgaattgcagatcgagctttgccgaattgccgtttctgccgtaaagccaatttttaaaaccgagcttgtcgtattgatcggaaatatccttcatcccttttacttcccattgcggcaaatccgcccacaggtcattaaagagcgtctcatcatccactttataatgagagccgtttgtatgaataaacatatcccggggttttaccgtttgcgacactttttggctcgttttatcaattttatgcttttcccggacagtcgatttggttgaggccgtgccttctgaaaaattgggctggaatgtccaaattccccatgttaaaacaagactaatgacgaccagcactgacagtatgactgtttttatattttcacgcctcatcccaatcatcctcttgctcttctttatatggaagagtaaatgtaatcttcgttcctttgccttctacactgtcggcccaaatgtctccgccgtgcgcctgaaccatctcttttgcaatcgcaaggccgagcccggtgccgccgagttttctcgtgcgcgctttatccactctgtagaaacggtcaaagactttttccacatcttttttcggaatgccgataccttcatcttttacgctgatataaagcagctcttctttctcgttcacatcgactgagaaagtgacatgcccgccttccggtgagtatttcagtgcgttagaaatgatattatcgagaacctgcgtcactttatcctgatcaatctccacgtacagatttctgtccggaagctcgcggataaattcaacatgctgttctttcgtcatttcaaaacgatcgataatcagtgacataaagcggatcatatgaatccactcccgattaaactgataatctttgctgtcgaatttagaaagctgaagcaggtcgttcaccaatctgatcatgcgctcagtctcattttgggtcaccattaagaaacgcggagcgatatctttgttttcccacgcgccctctgcaagcgcctctaaatagcttcgcatggtcgtcagcggtgtccgcagctcatgagacacgttggcaacgaactctctgcgttcccgatcgagtttttcctgttcggtgacatcataaagaaccgcgattaaaccgtcgatttttccgtgctctctctgaataacggaaaaattcacccgcagtacagtcgtttcatcgtcacgttcgatctccagcagcattgaatcctgctgttctactaaatcctcaaatgtaaagttctcttttatgcccaataaagacgtaatcggcatctctaaagccgtttcacgtgaaacattcagcagctcaagcgcagggctgtttaaaagaataatagccccgttgcgattcgtagcgatgacaccgtccgtcatatacgcgataacggaagaaagctttcttctctccccttccgtcatggcttgggcatcttcaagctctctcgtcagatggttgaatgtcgttgcgagctgaccgatttcatcatgcccgtatttccgcacctttctggagaaattcccttttgccagttccatcgcctgcttacgcatatccgatagcggatgggtgatggtgcgggcgagaaatataccgagaagagccgtcagaacaagggctaagcctgttcctgaagcaagaatcgagttgacggttttcatctggttaaaggtatcttccatactggccacgacataaatcgcgccgacaacttcctgattctctgtgacgacaggttttgctgaaatcagcactctgtttttgcttttaggatcataatatttttttgaataggcctgttttgttgagaaaatccgtttaaaaatcgggtcagtcgtctgtttccccgctatttcctcgccataaggcctcgaagaaccgacgacctcatagcttttatcaacaaatgtaatctcccgtatttcattgtttttcgtaaaatcattcaaaatccgtttgacgtcatctttaatgacggtgctgtcattatctcctttatattcctgctcaatataataggatagattgtcaatccgctgatttaacgataattcataggacttgagaagagaattctccacctgtttcacaaagtacacgccgataatctgcatggcgatgataatgagaagcacatagatcagcgtgatcttaaactgaatcgaccgaaaaaaaccaaccttattcatcgccggttagtcctgttcaggatttctcaagtaataaccgacaccccgtcttgtgacgatccagttcggatggctcggattatcctcgattttctcacggagacggcgcactgttacatccaccgttctcacgtcaccgaaatagtcatagccccacacagtctgcaacagatgctcacgggtcatgacctgtccgatatgtttggctaagtaatgaagcaattcaaactcacgatgagtcagctcgatcgtttcttctctttttgatacgacataagcgtcagggaaaatgacgagagaaccgatatgaatgtcattagaagctgattcttcctcagccggcgcaaccgtaagctggcggcgcaggttcgctttgacgcgggccagaagctcacgcgtgctgaaaggcttcgtgacatagtcatccgctccgatttcaagcccgatgaccttgtcaatctccgagtcttttgccgtcagcataataatcggcatatcatattttttccggacttcccggcacacttcaactccgtctttattcggaagcataatatctaaaagaattaaatcaggctgaagctcctccaccatttccacggcttcgtttccatcgtacgcacaatgcacgtcatagccttcttttcttaaattaaactctaatatatctgcaatcggtttttcatcatcgactacaaggattttcttatccatcatcttgattttcctcctgccagaatgacttcatttcatctattgatgtttcatgatgatcacaattcgtatcgtgaaaaacgttccccgtctattataacggtttcaggtcaaaagataaaaaaattaaagagaacagcgcaaaaacgtattgaactgccatccttttgtcatgttttttattttcttttaaaaaataatatttttttgaaaccttaagaaaaaaaacgccgtctagtgtttgacgtcttcttctgggccggctgaaaagccggctctcccttttttataacaaaagaaaaaacgcacctactattgcagatgcgtttgggtaagtggctcgggacggaatcgaaccgccgacacacggattttcagtccgttgctctaccaactgagctaccgagccagatgtttcttttctatactataaagtaaagtaaaatggcggtccggacgggactcgaacccgcgacctcctgcgtgacaggcaggcattctaaccaactgaactaccggaccttacagtaatttgtccggagaaccgtatcgtggcggccctccgaggacaaataaggagttagcaataacgctaaagtaaatcaatgacccgtacgggattcgaacccgtgttaccgccgtgaaagggcggtgtcttaaccgcttgaccaacgggccataaaaagtggtgagccatgaaggactcgaaccttcgaccctctgattaaaagtcagatgctctaccaactgagctaatggctcttgatgtgtcggattatgtatcatagagcattgagacaaaagctttcttgcagtactctattgaagctgttccgtaacaacgagatttataatatcatagaacattcgaaagtggcaactacttttttgaaaaaaaatctattatttttttcctacataaaaaaacaagcctccgtgaccggaggcttgtttgctgcaaattcttagttagcgcggtatacactgcggatgacgttcgtttgtgaacggtcaggaccgacagagaaaatagaaagcggaatacctgtcagctgagatacgcgttccagataatggcgcgcattttcaggaagatcgcttaatgtttttgcgcctgtgatatcttccgtccagccaggcatttcttcatataccggttcacactctgcgagagctttcagacttgccgggaattcttcaatcacttcacctttgtagcggtaagcgacacagattttcaatgtttcaatgccagtcagcacatcgattgagttcagagaaagatctgtgattccgctgacacggcgggcatggcggacaacaacgctgtcaaaccagccgacacggcgcggacggcctgttgttgtgccgtattcgcgtccgacttcacggatttgatccccgatttcatctttcagctcagtcgggaaaggaccgtcaccgacacgggttgtgtacgctttagatacaccgacgacgtgctggatttttgtcggacctacgcctgaaccgatcgtcacccctccggcgaccgggttggatgaagtgacaaacgggtatgtcccttggtcaatatcaagcataaccccttgagcgccttcaaataaaacgcggcggccttcatccagcgcgtcattcagaacgacggatgtatcgcatacatactttttaatctgctggccgtattcataatactcatccagaatatcttcaattttgaagccttccgtttcatacattttttccagcagacggtttttctcttcaaggttccgttcaagcttttctgcaaacacgtcacgatctagcaggtctgcgatccggatgccgatccgcgccgctttgtccatataagcaggtccgatgccttttttcgttgtgccgatcttgttggcccctttgcgttcttcctctacttcatccagtttcagatggtatggaagaatgacgtgggctctgttgctgattctcaagttatccgtgctcacattgcgttcatgaagatacgcaagctccgttacgagcgctttcggatcaacaaccattccgttcccgatgacacacgctttttctttataaaaaattcctgatgggattaaatgaagcttgtacgtgacgccatcaaacttgatggtatgtcctgcattgtttccgccttgataacgtgcgatcacttctgcattttctgataggaaatctgtaattttaccttttccttcatcgccccactgcgtacctactacgactactgaagacatatatccgtgcacctccgttaacctttcaaaacgatatctcattcaaacaaattaagtgtatcagtgccgaaacagaaagtcaatcgtaaatccgaacattaaaatcttattattctatatttgttcgccttaaacctgattaaaagcgttttctctttcatttgctatctattactcccgaaactttcatactttaacacgaaaaagaacccatatcccgggttcttcagacagtcatttatattccgcttgtattcatcaggacgatccgccagccgtcaggatcttcgatggtcacgcctttttcttcccagtacgggttttcgggttctttctcctcatatcccatctgctttaatttcgtgctgatgcgaatgacctcctgctgatcagggatgtaaaagacaagcaggctgtcgccgtgcggaacgggcgccggctgagacgagccggtttcttcggtgaattctaagtgatattgcgtatgcggcaggccgaacatgacgccgctgtagccctcatgtccggaaaaactgccgaccctcttcaatccgaggccttcttcataaaacctgatgatttctttgagctgtccggtcggccgggcaatccggatttgcgccgcttgaaattgcggaaattcaattgtcatcatcatccctcccttaatgccattatataaaagcgctttctttttatcgactgccgaacagacggcattctctcattctttcggatgaaaaaaagcctcaagacattgcttgaggctttacgcacctgccggaacaccgccgtcatcaaagcgcctttccagatttacgaacttattgtattctttcacaaaagccagtgagacggtgcccaccgggccgttacgctgtttggcgataatgatttcgatgatgtttttgttttcggattctttatcatagtaatcatcacgatacaggaaggcgacgatgtcggcatcctgctcaatacttcccgactcacggatatctgacatcatcggacgtttatcctgccgctgctcaacaccccgggagagctgagacagggcgatgaccgggacttcgagctcccgcgccagcgcttttagcgcccgtgaaatttccgatacctcttgctgacggttgtcgctcgaacggccgcttccctgaatgagctgcaggtagtcaattaaaatcatgcccaatccgttctcctgcttcagccggcggcattttgaacggatttcgctgacgcggatgccgggggtgtcatctataaagataccgctgtttgacaggcttcccatcgccatcgtcagcttgccccaatcttcttccgtcagattacccgttctgagattttgggcgttaatattcccttcggcgcagagcatacgcatgacaagctgctcggcacccatctcaagactgaatatcgccacgctctcatccgttttggtggccacgttttgcgcaatatttaaggcaaacgccgttttccccacagacggacgggctgcgacaatgatcaaatcattccgctgaaaacccgccgtcatccggtcaagctcgataaagccggtcggaatcccggtaatatcgcctttccggttgtgaagctgctcaatgttgtcatatgtttgaacaagcacgtctttaatattttggaaggcgcccgaattttttcgctgcgcgacctccataatcgttttttccgcatcgcttaataaatcttcaacttcatcctcgcgcgtatacccgtcttgagcgatcgaggtcgccgttctgattaaacggcggagaatggatttttcctcaacgattttcgcgtaatattctatattagccgctgtcggaacggaattcgcgatgtccgtcaggtaagagacgcctcccacctcttctaacaaatcggtattcgcaagctctgacgttaccgtgaccaaatcaaccggttcaccgcggtctccgagcacgagcatggcattgtaaattttttgatgtgacattctgtagaaatcatccggaatcaacacttcagaagccagtgtcaacgcagacggctgtaaaaaaacagcacctaacacggcctgctcagcttctatgttttgcggcggcagccgatcattcagaaggtctgtcatgctaagcaccgtcctttccttaaaaaatatccaaatttcattttaccatttctcatgaaaaagaatagaaaaatatcactttccctgtatttgtcaggagagggttatgtgttttaccgttccgaatgccgggaaacaaataaataaatcgaaaccgggaggtaagaaggatgaaaacatatgcagtaacacccagtgttgatgcggacggatggtttgtgaaggtggaaaatgtggcgccgacggctctttgtacatcaaaggacgcggcgattgaaaaagcggagcagatggcgaaagagaacagcccggctaagcttgtcatttatgatcagcataaaaacattgaagaggaacgttccttttaagaaaagccttcgcccgtgcgagggcttttcttattcgatgaaacggatgtgcagcaccgtctgcgccatgagatcggccgttttttgatacagctcccattcttcaaaggcggcgaatactttcatcatgtcctgcaatgtctgtttcagtatgataaattcgtcaattgtccgcagttctgcggcttttttctgataatcagccagcttcagctgtaataacatcaatggcgattgcataaaaaacctcccccattctgttataaagccccgcttttcaaacctccattcctttgtcatatcctcttacgatagatttctgattttagtacaataaagaaacggaaggagtgatcacatgaaaccgctgcaaatttccgccgaaacggcgcaaaagctcgcagaatcactgaatatgccgcttgagagaatcatgcacatgcctcagcacattctgcttgccaaattagctgaaatccaaaaagagaacgatcacaaataaaggctgctctctcatatatatgtgcgggaggcggaagcgatggctttccgcctcttttttccatgaagaaaatttcggtaaaaccgtctcacagctgaaaaaacttgttgacgaaggaaaagtgaactatttcttattatccggaaacaattcaggcaacacaaagcttgtctcatggattaaaaagaacggcacaaaaatctcagctgaccgatacagcaccggaaaaacaggctcagcccgatgaggaatgacaggcggcccgggcggacaaagtcagcagactctgtatgagatgaaaaaacagctcggaaagaggctggatagttaaacaccggcctctttattttgctcttgaagcacctgccatgcggcgccggtatcattcagaaaaatgattgataaatcctttctatttttgaaaccatcagttcctgacgcagatgccggccggcataggagcgcgcttcttttccaagccgttccctgagagactgatccgtaatcagctttacgagggcatcagcaagttcgcggctgttgccgggctgacagataagccctgtgtcctcgtgccggatcatctcagggattcctccgcagtcagttgcgacaatggcttgacctgagaacatcgcttcgatgatcgctatggggaaattatcattcaatgtcggcaggacaaatatagatgattcagccaaaagcgccggcacatcatgtcgttttccgaggaaaaacacgtttgagaggcccagtttccgtctcttctcttccagaaaccctctcatgtttccgtccccgatgatccatatatccactccggataaatggtgccggatgcgggcgagagcgtccagcagcacatcatgtccttttcgctcggtcagacgggaaacgcacgcaatcacgaccttttcagcacgttttggctcgggtgcaacccggatgtcaatgccggtatgaacagtcgtcagctgagcctccttcgctccgtactccagcaagggctcgtgaaaggagtcgctgattgtaatgattttatccgaagcccgaataccctgcctttctatttcactgaaatatgcctcttctattgaacccttttggattttatgaaacttcatccggcttttcgtgaaatgtccgtgcggcgtaaaaaaaagcggatgccgatacgtttgattaaggtatcccagcaaaaatgccgcaaataaatcctgcgcgtgaaacaggtcatattgttctaagtccttctccttcaaaaatctttgaaagacatgtaaatagctgagattcttcacaaacttttcgtttgcggccccgtatctgccaacaagaaacgctctgatctcgtcagcggcccgcgggatatcttcctgaaaaaaagttggcggcatttggagcggcgagatgacatccgcctggtgaccgatgcgctcaaaacccgtcttaattgacgtgatataactcgccagtcctccgacattcgggtaacggagaaaggttgcgtacagaatacgcaatggcttttttcgtttgggggagctttttccttccgcacagaacgaatacagcatctccggctcactttgatgttcgatcccgtaaaattgatccatgacgcgcaataaggttagaggcaccagaccgttcggcttgccgatctctcctttcaaatccgctccccctctcttaaacttataatcctaattcccgtccccattttgacactttgtcaacatgatacggcagcagttctcctccccgattgtcgaagattctccgcaattgggtatgaagccctttctcaagtgttctctgcaaataagccattttataaagcgtcataggaggggtctgaaaatgaatgccccgctttttcatttctttcgtatacacttttacgcaatacgtccgaatatcttctgcgtgccggctccagtcttttctgaagccgagcagaatttcgaccagcaccgtcatatcaaaccaaaccggcgcgtactttgcggattcccaatcgatgaattgaatatcccacggttcatgtccggacgcatcgtgggtgcagatattctgcatatgaagatcaccgtgtgtgatggctgagccgttttggaccaattcagggaaaaaacccggctcctcctgctccagcaagtttgtgatttgccgataatgaggcttcacgatatcctttgtgcgctcatctttaagagctctatccaataattccgctgtctttttgatctgctttttacgcccttttctcatggtttccgattcgtatagcggcagccacgaccgccatttaccgtcagaaacagccttgttttcaaaggtgcggctgtgcagttctgcgacagacggaataatatacttgaaatgcttcggatgaaatgtaagctgtcctctgatctggctgacaaactccataaatatccacgtttcatggtcactttcctctataagatagatgtccggcagcaaatcccctaaaacagaacgggctttcccgtatatattaatctcgaccttgtttttttcacgtgaagatttatacaccttcaatatcagcggaacaattccggattttttctttacaaacagtttataaatggcgcttctgtctgttgatttcaggcatgtgatgtcatccggattcaccgcggccctttcaccgaacgaatacgacagtttttcgtcaattctcagtttttgaaatgcgtcatacaaaagatccttttcatacatgccgatcttccttccgcttccgtttccagctgtttttgagatgagaccaagtgtttctgataaatggcatcgggtcattccaagcaaacagagcgtactctttttttcctttaaatcctttccaaaaatcccggaacgtcatttctcctctttttcgtttcttcaaaaacgttaagaagtaacgcacctcataaatccagttgattccgtctttttgttcgagctggggcttcacatgttgtccggtcaaatacagatagtacatgtaaacgaaatgaatgcctgccggttctgtcaggctatggctgagccaaaagcgcggattaatttcgataaacttataaacattgtcccgggggtcctttttaaattctgccatgcctactcccttcagctgaatcgcttcaaaaaacggcagggtcttctcgattaaatcaggaagccgtttgctgacgacgtgggccccgcgccaaaatcagcagggaattgatggttcttttgcagagagaataagcccattaatttcatttggtcatcataaaaagtggcgactttataaaaacactggttgtctccggggatgatctcctgcacgagcagttctccattttctctgtaggagctgaactccttgcgcaattgtgcggcatccttcattacaattgcttttttgtttactttttttctgtattcatggccggccaccggttttaaaatacacgggaagtcaatattggcgatggcctcttccagctcatcccggttgttcggaaaaaaggttttcgggcaggggatgttatgcttgaccgctaattcatatgctttgcttttatctaagaccgtttctaacagagagcggctcgggagcaaaaataaaaaaaaaccggctaatgtctcgcggaatttagatataaatcccgcataatcatcagaacctgcatacagaaccggctttgcttggaatcgcttcccgaaatcagtcaggaatgtcagcagttcttcctcttgtgttaaagggctgggacatatcccgcaatctgccaatcttgattttccgatacgataaggtccctccgtgtcaaatgcgtaaacatcgattcctcttcgggccaggctgcgaatgatcccaatcccgtttgcactgaaatctagtacaacggctgcatgttcatgtttcatgatctccctccgagctgttggtattttgataaatcgattcgatattttttatcatcgtctcactgctcaaatatttctccgcgtaggcctttgcgtttgaagcagctatcttccgcgcagatttgttagtgataaaaaacgctaaagcccgggcaagaacctttgcatttcccggctcgacaataagccccgttttgttatggcggatcagatccggaatacccccgcaatcggtcgcgatgatagccgagccgctgaacatcgcttcaataatcgaaataggcagactgtcattaacggtcggcagtacgaatatgtccgtcatattcaaaatagcgggaacatcatctctttttcctaaaaaggaaaccatagatagattcagttttcgagcctgttcctctaaggcgctcctcatctctccgtcgcccgcgatcagcacttcaacatgctcaagtacatcagacggaattcgtgaaagtgcgtcaagcaaatgattatgtccttttctcgggcctaatcttgcaatacacgagatgatgatcttatttttcggcagcgggatttttcttttcccgcctgtttttgcatcgtaatcgattcctgtgatcaccgttgtcatgtcttcctgttcggctccgagcttcatgagcgggctgcggaacgtatcgctgataataatcaggcgatctgcgtattcaatggctttcatctctagttttttataataaaactcttctatcgatccttttttaaagatgtgaaatttaagtctgttgaaagtaaacatgccatgcggtgtgaaaaataaaggtttcttatagatttgattgaatctgcctaatatattggctgtaaataaatcttgagcatgaaacacatcatatctttccaaatgaatcttttgaagcatttgctcgtatataaacatcagccgattatttttcaaaatatgattgttataatccccatatctgtccttaaagaaatcttttaacttcggaacaacagccgcccgcagttcttttacctgtgcggacggaaacagattaggggagatgacatccaccttatgacccctcttcttcaggccttcactaagcgttttaatatagtttgataaaccgcccgtgtgcgggtagtcccaaaacgtggcaatcaaaatggataacttcttttttttcctgtataaccgcggaatatgatgttcatgtttcaactgtgtctttactgccgcctttttttgagggcgcgttttgaccccgtagtagcggtcaagcgtctggaccatatacggatacgggacggaaaatgtcttgatcatttccagatcctccgcacgacttcaaaagcttcggcgtattccacacccgccgtcatccctctgacttttcctaaatgtttaacgccttcatatgaacggggatgagggtaatccctcatttctacgtcatagtggtgaagcgccgcgagtttagcatccattgtgtctgtgatgttaacgaagtaattaggtttgaagagtttatcagccgtattcctctcccactcgcttgaagatagcgtttcgaacgtaagcagttcgataggtttttgattcggaagcggtctggcggctgttaaaactgcttggaatgttctctggtggtccatattgatatcgccgtaatgatgtgtaaagattttatcaggctgatagacgcgaatgagctgctctaattctttgacaagcttatgaagagggatacattccagctctaaattcgtatgctccaaaaagatgactttctcaattccaagctcttgattcgcgcgttcgcctaattgtttaatatgatgagcttcttcttttcttcctaatgccgtaataatggaaatcactttatatccttcattgatcagccgttttatggtgcccgctgctcccaatagttcatcatcgggatgagcgccgataaccataatgtattctgccattttttccacactccaccaaacaaatgttacaaatatcatatgacgaccctaaaaaaaggaaacttacatgtgcggattttcagaaacttacatgtgcggctgccattccaggtaacgtgacggatttaatttttttatagtattcaaaaactcatccgccaagccgtatttgtccagtccttttaatagttttacgggaaaccgggtaatagcggaaaaagctcttttatggtcgatgactttaagatttccgtgttcattgatcagaatgtgcctgatttcggcatcccatctggtaaaaccgattctttttaattcatccagcatatttaaaatatcagcagtcattttgacggacagggatttttcttttctgatatggcgggcaagagaggtgccttggacgtattccatcacaatataacgatctccgtattcatacagtcttggaatcaccggggaaccttgtccggtctttaaagccgccaattccttcttgcatgtccctttttcaaagaagtattttatgcatttgttgtgtgttaagcggtagacttccccgtcttttccgtctccgatcagcggataatgctccagcgcctttttattctccggattattaaaatatgtttcagaaaaaaatcgtttcataccgacacatccttcgttatgatgtaatataatatgcaatctggtaacgatcggaaatgaaacaatctcatcattttcttgcgctgcgccgtctgctgacatgaaaaaaacccgccggatcggcgggtttttcattgtgtattacgcttcttcttttacgtgaaccttcagcacagcctgaacttcagggtgcagctttacaggaacgtttgtatatcccagtgtgcggataccgtcttggagctccagtttccgtttatccactttaatcttatgcgttttttgcagcgcttctgcaatctgcttgcttgtgacagacccgaaaaggcggccgccttcaccggatttggcactcagctcaacagtcagctgttcaagcgtttctttcaaatctttcgctctttcaagctcggcaatcgcttcttttttctctttttctttctgtcctttcaatgcgctgatgtttgtcgcatttgcttcgacagcgaggccttttttaatgagaaagttatgtgcataaccgtctgctacgtttttcatttcgcctttttttcctttaccttttacatcttgtaagaaaataaccttcatctctgaacgcctccctcaaaatattcatcaatggcttccttcagccggacgagcgcttctgagacagaaatgcccgataactgggttgccgcattggttaaatgccctccgccatccagcgcctccataataatctgcacattgacctcgcccagcgatctcgcactgatgcacaccgtatgctcatcccgtctggctaccgcaaatgaagcttccacttcactcatcgataagagggaatcagccgcctgcgcaatcagcacctggtcaaagtactcctcttcgttctcaggaagagaagcaatcgcgatatgttctttataaagagctgtatgctggatcagtttcgcccgcttgatataagaaccgacggattctttgagaactttctgcaccagaaccgtatctgcgcctttcgctctcaaataagaagcggcgtcgaacgtccgcgagcccgtgcgaagggaaaaactcttcgtatccactattataccagctaacagggccgtcgcttcaatcatattgattttgagccgcttcggctggtattcaagcagctccgtcacgagttctgcggtggatgaagcgtatggctccatataaacgagcagcgggtctttaataaattcctcgcctctgcggtggtggtcaatcacaacgatgtgctcgattttgttcatgagacgctcttccatcacaagggacggtttatgtgtatcaacgacgacaagcagcgtgtcgtcatttgaaatctccatcgcctcttccggtgtgatgaaccgcgaccacagctcttcatattttttaatttcttcaatcaggcgctgaacgcttgatccgatctggttcggatcaatgacgatgtagccttctttgccgttggcctgcgccaccttcaatattccgattgcggctccgactgcgtccatatcaggaaatttgtgccccatgataatgacattgctgctttctgagacaatctccttgagcgcgtgagaaatcacccgggcgcgcacccttgtgcgtttctccatcggatttgttttgccgccgtaaaatttcaccttgccgttcggcattttgatggccacttggtcgcctccgcggccgagagccaaatcgaggctggactgcgccagatctccaagctccttcaaggaagaaaccgatgcgccgatcccgatgctgagggtcaaagatacagtgtgaacggatgttttttcacggatttcatccaaaatcgaaaatttcgcgttttcaagctccgttaaaatgtgttcatttaacaccgcgataaaccgctccgaggacgtccgtttcaggaaaatgccgtactcctgcgcccacgcatttaataatgaggtgacctggctgttcatcgtgcttctcgtttggtcatccagcccctgtgtgacgtcatcatagttatctaaaaagatatatgccagcacggttctctcattttcatactgcttttcaatctgaatctgttctgtcacatcaaagaaatagagcagccgctcatctcttttaatcactactttaaacttccgctcattcaaggtgatcgtttccgaatcgacctcctgcttgatcagcggcacgacggcctcgcatgtgtcatacagcgagcgcccgacgagcgtactttcattaaaacaggaagacaaaaacggattcgcccactcaatgtaatattgatcattaaacagcataatcccgataggcatttccattaatgcctcttcgcctacttttttcaatctatacgataacgtggagatataatcgtcaatttcttttctgatcagagaatccgcacgcttaatgaaaaacaggatcacggcgagcagcacaacgccgatggctcctatcagccagttaaagtaaatgctgatgaggattatgatgattgacaatgcaatcaatgcatagatgggataccgaaacaacggtttttcataaaaactaggcatttctatcaactccccacctgtaagtcacactcaatttcgcgtcaccttatttcttatgttaaagcctatgtcaatgatgcctaagaggagatacacggacaagatgagcggaaaaagcacacccagcacaattgctaaaacaggaacggctttcggcatctccatttcgcggcaatagaaaaaaataaacgctaacccttgaatacaaatcagcaagctgagaataaatcccccattcaatgaaaccgaatacagcatatgccctttttctaaaggcagaaaccctaatatcgtcacaataaaatacagaatgacaacgctttgcgggagtttgagctctctaaaaggcttcatcttcggaagatcaggggaaaatcgccgtaaaagcggccttgccatagcataactgaggaaagaaaaaacgatgccggtcaatacgagcactgtcggaaaaagatattgaaccgtgctcagctgactttccatcagcttgatctgcttcccgaactgatctccgtaaccgagctgctttgacatggtttctgctaaagacatcgactcccgaagctgggacatggtggtatcgatcacattcatattaagaaacacgatgctgaccacaaaaaaaacgacgccgcacagcacatacgccatagcgccggcagcaaccgcatagccgggctgtttctttttaaaataatatcccatggcgattcccgtacaggccgccgtaaaagcgcctgtaagcccggtaaacgaacctacaataaagctgacaggaaggctggcaagccccatccataccccgggcttcagaccgtgccgaatggtgtaaagaatgatcggcagcggcaaagcaaagagaagaattgcccccagtaaagggaggtacacgaccaaaagggaaatgattgcaaaaatactgatcaaaatggcgccttctattagagcccttgtatttttcacttactcacctcaaaccttgtatcattcgaacatacgaatagaaaagagcagcttagacgactgctcttttgacgccgcaatgtctctttcaagacctgaattttccataaactctccaaaatacacgtatatattttaacataagtcgaaatcgcaagtaaaatgagcgcggacagccgcaatgttccatgtgaaacatgaaaacagacaaacggacatccccgtgaaagaatgcccgttgtatcagtgatcctgatcatccataaaaccagaagtttctctgtttttctttttggtttttcgtacatataacaagacgataacgataagtaagagagtggtcgcctgtaaaaccccgctgctgaaaaggaagaagttctttatcatgtcccacatatagtttcacctctatttcgtatttcctttacattgagtttccctttctggaaacttcaaaacatcaggaacaacatcgggaccggggcatatgctgaaagtgaaaatgaaggataaaggagattcttacactatgaccgagcggagaacattagcatggcatgaaacgttagaactgcatgagttagtggctttccaggcaaacggacttgtgaaattaaaaagaacagagcgggacgtaagcgatgccagattaaaacagctttaccgattttccatccattcgctggaacaaaatctgcgtgaactgcttcctttcttccctgaagctcccgcttttcgtgaggatgaaacagaagagcgcgctgattccgcgttttacagcggcggtctgctgagcatggccaaaacgtctgtgcgcaattacgccggagccattacagagacggccacaccccaattgagacacgttttcgtcaagcacttaaacgcggccatcaagtggcatcaaatggtctttgagtatatggaagaacgcggtcaatatccggcttacaacctgagcgaattgctgaagaatgatgtgcgcaacgccagaaaagccatcgcgatgaaataaaaaaaagcagcaaggaatttaatcctttgctgcttcttatttttgagcggactgatcttgaggcgacgttttttcccggtatgtctcgagaaactcccggttggcatctccccatttcttcatttgcaaaacgatcggttccagcgacctgccgaattcggtaagagaatactccacctttggaggcacctgctgatatacctcgcgatgcacgatgccgtccgcctcaagctcgcgaagctgaagcgtcagcatacgctgcgtaatgctggggcaaatgcgccgaaactcattaaaccgcttttttccgccgatcatatgataaaacaaaatacccttccactttccgccgataacggaaagcgtcagttcaaccggacaaccttctttattcggatatatgttcatttttcatcctccatagtaccttttttgatactatatgctgattagcatctgacttacccagtattttactcgcaatcctcctcaccgctcaacaaaaatgcttctttttcacatcaatttttaaggttttgaagattacaccctccgcaagacgtgttaaactataaaaagattgtttacactacaaaaaaggacaaggagttattatggaaaaaattcttattttcggacatcaaaacccagacacagataccatttgctctgccattgcctacgctgatctaaaaaataaactcggcttcaatgctgagcccgtccgccttggacaagtcaacggcgaaacacaatacgcgcttgattatttcaagcaggaaagcccgcgtttggtggaaacagccgcaaacgaagtaaacggcgtcatccttgttgaccacaatgaacgccagcaaagcatcaaagatatcgaagacgttcaggttcttgaagtgatcgaccaccaccgtatcgccaacttcgaaacagcggaacctctttactaccgtgctgagccggtcggctgtacggctacgatcttaaacaaaatgtacaaagaaaataacgtgaaaatcgagaaagaaattgcgggcctcatgctgtcagcaatcatttccgactctctgttatttaaatctccgacttgcacggagcaagatatcgcagcggcaaaagagcttgctgaaattgccggcgtagatgcggaagagtacggcttaaacatgctgaaagcgggcgccgacttaagcaaaaaaactgtggaagaactgatttctcttgatgcgaaagagttcacgctcggcagcaaaaaagtcgaaatcgcccaagtcaacacagttgatattgaagatgtcaaaaagcggcagccggaattagaagcggctctttcaaaagtaattgccgagaagaaccttgacctgttccttctcgtgattacggatattctggaaaatgattcccttgcgcttgccatcggtgatcaagcgtcaaaagtggaaaaagcattcaacgtgacgttagaaaacaacacggcccttttaaaaggcgtcgtatccagaaagaaacaagtcgttcctgttttaacagacgcgattgcagaataaccaaaacaccccggcaaccagccggggtgttttttttacagctcgttcatcagacggccgtttcgtaagcgcttactctaaaattattttgacgcctattaatatacaatatataatatatcacatgtaaggcgttcatttttctaattattgtaagttgctgtcgcaacatcagaatcgggggtgtctatcctggaaaaacacgctgctctttcttattcacgaacaacaggcatttggcttgtgcttacaggagctatcttatggggggtctcgggaacggttgcccagtatctgttccagcaccgccattttaatacagaatggctgacttcggtgcgccttctggtgtcaggggcgcttctgctcggaatcgcgtaccgcaaagaaaaaggacggatatgggctgtttggaaagacagacgggacagaattccccttcttttattcgggattttcggaatgttaggtgttcaatacacctacttcgcggcaattgagcatggcaacgcggcaacagctaccgttcttcagtatttaggaccggcgatcattacatgctttttagcgattcgcgcaaagagaattccttcaggaaaagagctgctcgccgtcttattggcggttgccggcacattcattttggtcacgcacgggaatgtcggaagcctgtccatatccggtctggccgtcttttggggaatcagttcggcgtttgcactggcgttttacacccttcagccgcatcgtctgctgaagaaatggggatccgccattgttgtaggatggggcatgctgatcggcggagccgccctcagcttgatccgcccgccctggacatttgaaggcgagtggtcctttcctgcatatgccgcgattgtgtttatcatcattttcggaacgctcatcgctttttattgctacttggaaagcctgaaatatctgagtgcctctgaaaccagcctgctcgcctgtgcagagccgctgtcggcagcttttttaactgttatctggctgcatgttcccttcggaatatcagaatggctgggtactttgctgattttaaccaccatcgctttattatctatcaagaaaaaataacctctcttttttagagaggttttttcctagggccagagcacccttaggctcaattacccatatattaaaaggccttttttcattttactatcatccaaaagaggaaaatagaccagttgtcaatagaatcagagtctaatagaatgatgtcgacaagtaaatcatgcaggattgttactgataaagcaggcaagacctaaaatgtgttaagggcaaagtgtattctttggcgtcaccccatacatattttaggtctttttttctgtaacaaacctgtcatccatgaatgcaggaggatcgaatcggcagatcgcaaaaaaaggtacatacaaaaggagacatgaacatgaacatcaaaaaatttgcaaaacgagccacagttctaacttttacgactgcacttctggcagggggagcgactcaagccttcgcgaaagaaaatacccaaaaaccttacaaagaaacgtacggcgtctctcatatcacacgccatgatatgctgcagatccctaaacagcagcaaagtgaaaaataccaagtgcctcaattcgacccatcaacaattaaaaatatcgagtccgcgaaaggactggatgtgtgggacagctggccgctccaaaacgctgacggaacagtagctgaatacaacggctatcacgtcgtgtttgctcttgccggaagcccgaaagacgctgatgacacatccatctacatgttttatcaaaaagtcggcgacaactcgatcgacagctggaaaaacgcgggccgtgtctttaaagacagcgataagttcgacgccaacgatgaaatcctgaaagaacagacacaagaatggtccggttctgcaacctttacatctgacggaaaaatccgtttattctacactgacttttccggtaaacattacggcaaacaaagcctgacaacggcgcaggtaaatgtgtcaaaatctgatgacacgctcaagatcaacggagttgaagatcataaaacgatttttgacggcgacggaaaaacatatcaaaacgttcagcagtttatcgatgaagggaactatacatccggcgacaaccatacgctgagagaccctcactacgttgaagacaaaggacataaataccttgtattcgaagccaacacgggaacagaaaacggataccaaggcgaagaatctttatttaacaaagcgtactacggcggcagcacaaacttcttccgtaaagaaagtcagaagcttcagcaaagcgctaaaaaacgcgatgctgaattagcgaacggcgccctcggtatggtagagttaaacgatgattacacattgaaaaaagtcatgaagccgctgatcacttcaaacacggtaactgatgaaatcgagcgcgcgaatgttttcaaaatgaacggcaaatggtacctgttcactgattcacgcggttcaaaaatgacgatcgacggtattaactcaaacgatatttacatgcttggttatgtatcaaactctttaacaggtccttacaagccgctgaacaaaactggtcttgtcctgcaaatgggtcttgatcctaacgacgtaacgttcacttactctcacttcgcagtgccgcaagccaaaggcaacaatgtcgtgatcacaagctacatgacaaacagaggcttctttgaggataaaaaggcgacatttgcgccaagcttcttaatgaacatcaaaggcaagaaaacatccgttgttaaaaacagcatccttgaacaaggacagcttacggttaacaactaataacaacaaaaagaaaatgccgatacttcattggcattttcttttatttctcaataagatggtgaattcaatcatggcacgaaaatggcccgttgtaatattgatctttttgggtgcgttcctgtttgtcggcttactgccgaacaaaaaccacaattcctctgacacaaacaacacggagcataagaaggattaccgggcggcgtatcattttacgactccggacaaatggaaaaacgaccctcaaaagcctatttttttcgaggggaaatatcattactactatctttataatcgggattacccgaacggcaacggcacagaatggcggcacgccgtatcaaaggacttggtgcactggacggacgaaggcacggctattccgaaatacaccaacgaaaacggcgatatctggtccggttctgtcgtcattgataaacacaacaccgcgggcttcggcaaaaacgcgctggtcgccgtcacaacgcagccgacagccaaaacaaaagcccaggaacaatatttatggtacagcacggataaaggaaaaacgtttacttcctatagtgatcagcccgttatgaaaaacccgggaactaaggatttccgggacccgaaagtgatctgggatgaacaggatgacaaatgggtgatggccatggccgaaggagaaaaaatcggtttttatgaatcacccgatttaaaaaattggaaatacacgggcggttttatcactcagcagatcggcctcatcgaatgccccgacctttatatgatgcgtgcagatgacggcacagccaagtgggttctgggcgcaagcgcaaacggcaaacccgcaggcaaaccgaatacgtacgcgtattggaccggaaactttgacgggaaggaatttaccgccgatcaagaagaaccgcaatggcttgattacggctttgactggtacggcggcgtcacatttgaagacggtaatagcgaagatccgctgacaaaacgctatgcgctggcatggatgaacaattgggattatccgaatgaaacaccgacactaaaaaacggctttaacggcacggattctatcgtccgtgaaatccgtcttcagcagcaggacggcggcacatacagccttgtgtcagagccggttgaagcattgaaccaattaacttcttcaactgacagcatagaacacaaacaggtgaacggttcagagacactgccgatcaaaggtgatacatatcagcttgatatggatatcgcttggtcagatatcaaaaatgcaggcgtcagactcagagaatcagcagaccaaagccggcatattgatgtcggtatttcagcagaagacggttgtgcctatgtgaacagatcgtttacagaccagcctgataaaaccggtgcatacaccgaaagcaaagccccatttgacggaaacaaagggcgcgttcatctgaaaattctcgtggataaaacaagtattgaagtatttgcagacgacggaaaaaccgttttgacaaatgaagtgttcccaaaacacgaagatcagggaatcacgctcttttctgaaggcggctccgctgactttcagcatattgagatgaagcatctcggttcgattcattcttagacgtccctcttcatttctaaccggcgcccggactgtggtaaaatgcaaatatgtatactacgattcatgaggtgttccattggataatcaaaacaaagaacctgtgctgaaaagaaccatcatgcgggacgaagtgtatcgcacactcagaaactggatcataacgggcaagctcaaaccggaaacaaagttaaaggacaaggatttgtcggaaacattgggaatcagccgcaccccgatacgggaagccttattgcggctggaagatgacggcttggtgataacaaaagcgaacagatggacacttgtcgctccgattgagttaaaagaagcggaaaacttgtattccatcgtctggacgcttgagaaactcgcattgcagcaagccctcccgcgtatggacgatgccgtgattcaagaattgaaacagctgaatgaaaatcttcttcaaacgatgaaagacggcgataaaatggccgttctggaagcggataatgcatttcaccatcgcatcattctgcttgcggacaacgctgaacttcacaaattgctagtaagcctgaaagtcaaaattcagagactggaaatccgctatttcagtgaaaacggcgctttaaacagatcatataatgaacactctgatatcattcacgcattagaacagcaagatgccgccgctgcttttacagcgcttgaagcgaattggaaaaacagtttagaacggctgcaaaacatggcatagcaaacgaaaaagccaaatcactcatatgatttggcttttttacggatatcacaagacagccgcgttgcctgtcttgtttactttttgtttatatataaataaataccgtaatccgtcggcacagaagcataccccatctgtctgagcatggctgttatattcccgcgatgatacgttccgtggttcacaacatggaggatcatatcggccgctgcggttttcatgatgtcacctgacggatgctctatttcaagggggaggctgatattttcctccttctgcaaaaatagttgataccggtctgataatttcaaaaatagatcttccagctcttctatctctttagacaagatgtcctctttttgctgttcagctgatttcagcgtatcctccagacgctctccggagaacacatcaaaccaccccttatccgacagatacacatgagtcaatacaccggctatcgacggaaagacactttgaatctccttacggtacacatcctccggaagctctttaagccgggtgaatatttgctgatttgcccaaagatgataatcatacaattgcagtgccagatgtcccacattaccctctcctctctcgatatagaacgtacgttcctaattatactacactacatgccgctctgtaccattttcttcattcgcagctgagaaaatccgataaaagccgaaattaataagagaaggcctgcgccaatataaataaaccgcacgccgaatacatccgagataatccccgttccgataatggaaaacataaaaatgaactgaactaaagctgatctcgccgctaatatattgacccgtgtcttttcggtcgtgatattttgaagtaatgtttcctgcgtgagatctcgtaatacacaagccggccccatacacagcaccagaaaaagggccgtaacggcgcttgtgatcagcccgtaaataaacgtgaacattccatatgccaaggctcccgtcagcataagcggaatgagatgatgctgaagcttaccggataacttatagatgatcagtccgccgatcatcgtccctgcataatagactccgttgacatacccccaccaagcctctcctttatgaaggacgtcatgcacataagttaaggacacagacccgatccatatcatgcctgcccacgattcgatcacatccatcacaatgagaaccttgagctgtttttgctgaaataaatacacccagccgcttgccgcatctgcaaaaagggaacgttccctgactgctgccggcgcacacatgcgtacttgaagaaacagaatgatgcccaacaccgaagaaaccaataacatgacagtgacgatcattgtatcgctctctcccaggaacgctatgatgacgccgcccagagaccaccccgcaaactgaacggtctgatccgccgccgataataaactgttcgctttcgcccttcgatcaggaggaatgatttccccaatcagcgcgctttttatcggagcaaaccatccgttgcaaaaagaaatgcctccgatcagacaaaacagcagaaaaaagaatgcggatgaaccggtttggatgacaaaaaacaaacagactaacagtgtgatctgtatcaattgagaactgattaacaaagaacgaagcgtgaaccgaccggtgaccagcggcaaaacggcgctgcccaatacgcggcatacaatgctgacgagcgtcataagagaggccatcgccgtcgaaccggtttttgtaaacaaaaacaagatgacggccatcgtataaagtgaaaaccccaagttgatagcggtctggctgtataaaatagcgtaatacgctctcttcatattcatcctctgcaaccccactccctgattatgtaaatcataccatatttaccgatcagctttttttaaaaaaacagattgacatggagtccactccatctattaggctttattagcagatagaagactttcagcaaataacaattaagaaggggtgacagctgatttgacatccccaatctatagtgatgtatataagaaatgattttcaaaacagaataaaaaaagagggcttcctttccggaagccctcactcactccgtctgctacgccaataaaagaaaaataagcgctaaaacagccggaagtccttgttttacgataattgatttgtttgaagtaaagcctccgaaaatggccgcgatgaccacacagatgacgaaaaacatttgaatcatatggccaatcggatcagctccgaggatcagtccccaaatgaggccggcagccagaaatccattatacagaccttgatttgcaaacatgaccgccacattccgatcgccttctaaatgcttcggcaatttgaaagaccgcttggcagccttcgaattgataaaaaacatttcaagtatcatgataaatatatgttctaaagctacaattccgacgaaaacagccgcaattatgtccactgtccctctcctctcagcttcacttcaaccttatttccattgtgcgattgtttcgataggaagacggtaggaagcatatccttcgtctgccgcttttccgattgataacagcatgaccggtacataacgctctttatccattccgaaaacctcggcaatcttttctttatcatagccgccgatcgggtttgtatcatagccgtgcgcgcgtgccgtaagcatcagctgcatggaaacaagacctccgtcgatcagaatcgtttcacggttcacttgctccggcagtttttcaaaatgcgccgtcaacgcagcgatttgtctgtcttttacttcctgcggcatgtagcccagctcgaccgcttttgaataaatttcttctaaatagtcatcactgttcatatctgcgaaaaccgcgatcaccgcagatgatgtgctgacctgtgtttggttaaagctggcaagcggcgcgagtttttcttttccttcagggctgtcaatgacgaggaaacgccatggctgcgcgttaactgaagacggcgctgtcgttgcttcttccaatatttgagtcatttcttctttgctgatttttacagccggatcgtaattccgaatggaacggcggcctttcataatgtccataaaatcgtttgttttcagttctgttttcatgtgtaatacactcctatgctttcatattttctatattattctgcatctgcgacaatacgttttttaacatactgcgttcttcctcgctgacaccggcaagcatttcctttatgaaacgctccttctcctttttggaagcctcaattctctcccgcccctgatcagtaagccggacaagtataattcggttgtcctcaggcttccgccttcttgtgaccatttctttggcttcaagctgtttcaagtgtcttgtcacagctgcgccgtcaatattcacctttttctgaagatcgctttggctgatctcatcgacgtaaaaaagcacggcgagaagctcaaggcgggattggctgattccggtgcacgcttcaaacttcgtgccgatcactttgtgcagtgattggagctgatacaaaatctcgccttcctctgaacaacatgctgtcaaaacccatccctactttcttttgcgcaattaattgactagtcaatgtttgatatatcaataatatacatccgttattctttttttgcaagtgttttctcctttttaaaaaaagctgccggtgaacggcagctccttcttaatgattatggatttttctgaaattactgccttttacttcagcgacatcatataccgtcacaaaggcttgattatcaatgtcattaataatttccttcagtttggtttcttccaaacggttgatgacacatgtgatttctttgaatttttcatgagaaaaaccgccgtatgcttctttatacgtagcgctccggcccaattcttcacgaatggtctctaccattaatgcaggctcgttggtgataatctgaaatgttttagaaccgcttaagccttcctcaaccacatggatcaccttggatgcgatgtagtaagcaatgacggaaagcaatgcgccttgcagcccgaatacaaaagaaacaaaaataaacacaaaaatgtttaaaaataaaatgagatcgctcgtgccaaacggcaatttccgtgacagaagcacagccagcatatcaattccatctaaggcgccgccgttgcgcaatgccaatcccattcccaagccgagaataatcccgccgacaacggtgattaacagggtatctccctcaatgatagccggcgtgtggtggaaaaaactcgtgcccgcggcaagtgagacaataccgataattgatagaaacgcaaaacctttcccgatttgcttatatcctaaccagacaaacggtatattgatcaccgcaatcaagatcccaagaggcaaatgaaacagctgtgaaccgacaatgctgagcccggttacaccgccgtcagatacactattcggaatcagtacggtttccagtccatacgcggcaataattccgccgatgatgaccatgatgacccgtacgattgatttggctctgaatttcttacgtctttgtttttcgattgtactcatatcattccccgcttcaattattttgtcttatttaaatataccataattgatacttttcgttaaaaataagcctatcggctagttgaagcaggaaccgaggaaggagatttcacagataacgtatccatttatgactttaatcattcacaacgcaatcattcagtaaaaggaattatcatccattaatagtctcttttgtttcccttcttcacatattcccaatcatgctctatattttttctcacccgctgaagaaggctgaaaatggtttctttttcctcagacgtaaagccggacagtgctacttccgcagagtgctctccttctctttgcaataacggataaacctttctccctttttcggtcgggaacagtttttttatttttttattttgatcatcaggacgcttttcaacaaatccttgtatttccagttttttgatcgctctcgccgctgttgttcggtcaactttaatcatttccgccagtttttcctgtatcactcccgggttttcacatatacgcacaagatagagatactgcccttttgttaagtctaattctttaaattcaatattgctgatggaatccaatgcccgtgcgatcatgccgatttcacgcaaaatatcagtcatatcttttcaaacccttcatatttttgttgcacttgcaatataaatgtttcgtcgttacttctataagaccacaagcaagccgtgcagtccagactaatatgtgaaaagggttggttgatcatgaggatacaacagaaattgatttacaagcagcgcttgagattagaaaagcagtattcattgaggaacagcaagtacctgaatccgatgaatttgatcagttcgatacgcttggggaacagtgcgggcatgtcttggtttatcatgagaatcagcctgccggcacaggacggatccgcatcgtaaaccaaacaggcaagctcgaacgaatctgcatcctgaagccttaccgcaaatacgggttgggcaaagtaatcataagcgaatgagaaaacatggtaaaagaaaaaggcatcacccaatgtaaactgaatggacaaacacatccggaaggcttttatcacatcttaaatagtccgattaaaatctattaataattaacagttgaagagatggtgaaaaaagctgattctctctattatggactcctgccgcgttacattttttctatcttcacatatctttactattaagtacgtttaaattgatttcaggaggagatatgaagtggaagaaacgagtatggagccatcacgactctgcaaagaatttgcaagaattctcaattcaacgcccagtgtcgtaaatggcgtatgtacggcgacaagatttcgaagcaacattcacccggtggtactcggaagaagagccgaggcatttccttttattcctcaggccttttcatttgagagcatggactcggaaggcagagccttatgtttaggtgagactgttttactgcaagaagaagtgaacccattaatgagtgaactgcgcaaattcggtatcatcgtaactgccgttcataaccattggctgtttgataaaccgcgtctgatgtttatgcattttgaatcaattgacaaacctctcaattttgcaagaaaagtaagagaggccctaagagttctgactactaaaactgtgcgtgcggtaccaaaaactgacggggaaatgattgaacggcatggtctttgtgacgaattcaacgatattctgggcggaaccatgcatacgtttgaaaatggaatttgtacagtaatgagatcacgaacgaatataaaaccggttgtactgggacggcccggaagatcatttttgctcattccgcaaatgttttcatttgaatcaatgacaaaagacggccgtgctctttgcagcggagaaactgtaattctgcaaaaagaaatcaatccatttatcagcgctcttcggaaacatgatctgattgtaacgtctctacacaatcactggctgtttgacaaaccgagactgatgtatattcatttcgaagcgattgataaacctgtcaacttcgccttaaaagtaagaaatgctttaaaagtgcttactgataaagaggtcgaaggttagcatgtttctaagtatcaaaaagcgattcatataatcgcttttacatatgatcagccgaaaacaaaaaagaggtcagacatttgtgttaaaaacagccttataggctgtcgttttgtgtatattctattgatgagtttatactacttcatcccgcattccatacaagctctttatttctcaatggctttctacatgccgctgtgcaaacaccttcttagctactgaaagagcattaagtacacgcgggaagcctgtataaggaaccaattgggtgatactctctacaatctcagtcggtgttaatccggatgtaagccctgtattgatatgaagttcaagctgcggctcggttccttgcgttacaagggatgaaatggtaacaagcgcacgttgttgattggttaatcccggtcgtgaatatatatctccgtaagcaaattctataatgtacttacttacatctggagcgatatctttcaagtcttcagaaatctttaaatgcgtagaaattttatcatcgtttgttaaagtgtactccattaatttgtctaaaccttgctggtaacggctttgatccatttgaaattcctcctgaaaggtacttatttcctgacataagataatatatcgcagccctctctaaccgtaaaatacataaaaactataaaaaccattcatttttttcatgagtgatcttagtctacgtaattactcttacaaaaagatgaaatataccggataaattcgcgtactgcgtgtgaaacgtattttcctttttttaaaataatcgccactttccaaggaatggatggattgacaatggagattgccttaactaaactttgatcagtctttttcactatcgactgagggaaaatggaaatacctagttcttctccaatcatttcgctgataaaatcccattgagaactttcataaacaatatttggacgaaaaccggctctaatacactcctgaataatccgatcgtgaagagaaaagtcttcactaaacaggatgaaaggttcatttttcaagtcttgcatttccacaatctctttatgaacaagcgggtgagcggaatgaacgaagagcatcagttcttcattaagcaatggaatgatatcaaactgctctttgtccactggttcaataaccacgccaagatccagtactccatcttcaacctcctttttcaccttgtttcctccatgttctatcagcttgatgttcacatcaggatacaattgtttaaaccctctaatgattttaggaaaaaacaagacaccgatcagcggcggtattccaattttcacttttcctttttttaaatgcaaaagatcgtataagttcgtcgacaagtcatctaatgacttcataatcatttggccttgctcaaatacaatttcgcccgcatctgtcaaagcgatttgtctagcggatcgatcaatgagatcaacctttaattcctcttccaaacttttaaccatcttacttaaggcaggctgtgacaaatgcagattttctgatgccttagtaaaactgttggatttagcaacttcaagaaagtatgtgatttggcgtatatccatcgtatgatctccatttcatgagtttaacgaatacattatattctttttattcattttacttatacaactgccgggtgtaaacttttaggagaccaaaatgtttcctggaggggttactatgagtaaattattagaaagtaaagttgctcttgtgacaggcgcggctagcggaattggtttagaaattgcacgtgaattcgctaaagaaggcgcaaaagtggtaatttccgatttgaacgaaaaagccgtgcatcatgcagctgaggaacttaagggacaaggatatgaagtcctgcctgcggtttgtgatgtaacaaacgaagaacaagttgaaaaaagtttctctaagacacttgaaacctttgggcgaatggatattctggtaaacaatgcggggattcagcatgtgtctgatatagaaaacttcccgactgataaatttgaatttatgctgaaattaatgattactgctccttttagtgcgacaaaaagagcgttccctttgatgaaaaaacaaaaatttggccgcatcatcaatatggcttccataaatggtttaattggttttgcagggaaagcagcttattgcagcgctaaacacggtttgatcggtttaactaaagtatcagcattagaaggagcggaatacggaattactgtcaatgccttgtgtccgggatatatcgacactccattggtacaaaaccagttacaagatattgcagagactagaggcatttctatagaaaaggtgtttgaagaagtcatttaccccttggttcctcaaaaacgtttgttagccgtgcaagaaatcgctgattacgcagtattcctcgccagtgacaaagctaatggagttacagggcaggccgtcgtaatggatggcggctatacagcccaataatctaaatttcatctgcaggagtaatagtgctttgggttaaatgatttactcttcaagaaccaagccgatggttttttaggaaagacatagctatacagattgaagtttgatatatatttggtatattaacttaagaaaagccgccctgttggcggcttttttatcctgaatcctgtaatgtgaaaatgttaaaaagcaacggaatagttgttgtcttgcagaatgcgaagaagctgttggagctttcacaaagtatgtgggtgaagctgcagataagtgtgtaagattcccctctccccataatgcgcccgcactttttagaattaatactattctgcttcaatttatcttcaattgttggtattctggcaacgaaatcttcataacgctgaaattggtcaaacggtatacttaattttccggatacatatataatcaacttgaaagaacattagaaatagtcgaagaaaaatctgcagctgtaaaaataccatctaaatggacattgatggagtatgcgtcaacaatataacaattaaattaaattaattcggttcctctttccctaaggagcctaaaaatcagtcacatcatccatcttcagccttcaaacattatcaagccttgatgaggcaagaaacacggggtatcatagacacacaaaaaagatctcattatccaaagtcagattgagtatttttagttgtataagataaaggaggaaatagattgactttacatcattttattggggcggataaagaacttcctattggtgagtatggcagtaatcctacacttaagcccatttctgaactaaaaataaaaggagatgtcaacaaacgctctcaatttaaaaacaatcgaaagaacagtgaaaattcacttgtaaaggtttatgacacagaagaagatgcatacggaattgatattgttcatttagatcctggatatgaagcagtcagaaacaaattcacacatccttatatatatgaattacaagggtacttacatgccaacaatacacctggccaacgtaaatctattaaatcactttttcttttcattgaaaaacacttgtcaaaaggtgaatcaattgaaatatattcctgcttagatggatatgaagatgaagataaagatgaaagcatgggtgtagttatcaatttaaatactttacaatttggaaaacatataaagtttaaagatataaatcaccttagtcatatattctatttggaagataaacaatatgtattagtcaagaaataaacaagaaaaatcccaattgagtaatgttggtttaataagtaaggaaaccattctatacggtttccttacttatatatattattcactaaaatcattcaatttttttataaaaaattgaatgattttaatcccatctttcaaaatgcacttttaatcctggtatactcaatattctttgtatttctttatcatcttcagtatcgatataactttcttcttcatgagagcatgttaccaaccactcctttccatctttaaaaaaagacaagtcttctggtaaatgtggctgctcccaagaatataaagaatttgcggattctttcagaatgttttttgcgttttcatctgtataatagtaataaacttttgctttttgattgtctcctagaatggtactggcccattctgattgctctttcattacttttaacgaactttcaagtttttttaacagaggatcgaatgattttaaagatcccatatcttttcttaaaactaaatgaaattcgtcgcaaatctcgaaagccaaatcaattaactctgaatacagctgatcctttgggttgtgatcaataattaacatagttacctccttctcctattataatttcctatcttttaattactttaaagttaggtgtttataaattaatctaaattatcttgctgccccatagaaagcatgagctttcatacggacaccttttccatgtttatacctagagatcgagtgataatgataatgtttacctttaccctttttatctatctccggaccaacaatttttttaatcggacttgcggctttagcaatagatttggcattgttcttcgacgtagaccaagtgtcatcaccccttttaaggcgtgcaattgcagcaggtcttttcaaaccattaccgataaataatcctttagactttcttactgccatataatgagaataggttcttttacgcttcttaaactcagaataggcaacataagtcactcctgaaatagtcacagctaatccaattgaaattaaatgcgctaaaagtgcctctccaataactattcctataggtataaaccaaacaaaagaagctgttacctcatctgaattaatctcatactttttatttgtttccgtatcagtaaaagttgcttctatcttctcatttgtagcattttcaatatcaactttatattctttacctttttctccagtcttctgagaagtttcatcggttattaatgaaagtttcatattttctttatctaaagtcattaaacctttaactccgcctttttctgctgtgattactaatttctcttcatcatttgttacaatttggtaatacctattgtttatagcctcagcttttgattcattatgtaaaataaaagtaaaagttaatattagacttaaaaaaacagcaatactctttttaaaacatttcattgaaattagcccctttacttaaaagataaaaatccttttccataaatttcatctctccctttctttccaagatcgatggacaatttggacaatacacggttaacttgattataaatatcctcttttgaatcaattccgaatttatctctattttgtaaaattaatgatattactccggtaacatgtgcagctgctaaagatgtaccactttcagttttatatccattattgagggatagtatcggtatatctacaccaggtgcagaaaagtcaatctttcctttaggtgaaaagttagctagtttattatttctatctacagcattaatagagagaactttttcataagctgctggataatcaacatccccgccataattgttacctgcggctgcaacgattatgatcccactgtttactgctttatcaattgcacctcttaacaacggtttatctttggttaatccaaaactcaaatttattacctgaatattattatcaatacaccactctatacctttaacaagggtatctagcgaaccttttccttctgaatttagtactttaactgaatatatctcagtgtctggagcaattccaactaatccaaagctattatctttagctgctataatgcctgcaatagcagttccatgccccacatcatcatctgaggttaaagtcatgtttattggattaaattcccctttaattttcccttttaaatctttatgctctttatcaataccactgtctaatatagcaactttcactttctgtttctctcttaaagtccatattgaagcagcattgatttttttcactccccatggtacttcttgtacacggttatgattaattttttctgtttcatttctctctatatgcttaaaaatgaataaaaagcacgcaaaaaaacctaatgtaaaaattaatataaataataaaatatgaggttttttaattgctaacaccactttttgaagatttgtaaatattctcatccttggccaagaataacaaacctattatatcaatctgcaattaaaaatcaaagtttttcaggaaatatttcattaataaattacggttataaagtagtgtaattcttagttcttagtcatcataaaattgaccttcaaatgcatatttaaaacaaatctcaataaagaccggtatattaacttaaataattttgaagacttctgctagtgacggttttaaagataatctctctcttacagctctttgaatatcaagttctcctaagtattttttaaccagcaccccaaccgtagtcagcgaacaatccgcgtgtcattggtgtcatgtctctttctattaaagtaattatgataaatttatctgcttgccaattccttaatcatcaaacccaattcataaattcccttttgaaggtcttcaagagatgcataagcatatgataagcgaatataactccctttttcctcagcatagatcctgccgagattgagcagaatcccttttgataaggctttggtataaagtaatttcacggatatggaaggcaatatttttacccagacaaagaatcctccctttgggatattccatgtcgccacatctttcaaatgagtttctaaaacactcaaggccaattctcttctcacctttaattgacttctcacctgttctagatgctgctggtattcaccggatataaaccactctgccgctactctctgggataacgaactggagccgtaatctgtttgcatttttatgtcggataaacgttcaatcactggttccggcccgacaatccagccaatcctcaagcccggacttaatgttttcgataaactgcctatgtaaagcacatgcccatttttatctattgttttaataggatccgggggaatctcatctatccataactcacgataaatgtcatcttcaataatgggaagctgtgtattctcacttgccgcaaggatttcttctcgtctcttttttgacattaaaatacctgtcggattatgaaaacaaggatttgtatataagatagccctccccgttctccccttgccatgcggatatgttccggcaaaagtccatcatgatccataggaactccagtcagcttcataccggctgattgaaatacgtgtaatgaataaagataggaaggctgatcaagataaacggtcgatcccctttgtaaaagccccattgatataagctgtaaggcttgcagtgcgcccgaaacaataagaatggaagaaggagaagcttgaatgccgattgttcttaaatagccgcttaatgcctctctcaaaggcaaatatccttttggttcctcatatccgaatgcctctatgttttgggatacctttcccatgatctctttcataacagctaaaggaaaaatctcatgtgaaagttctcctttactgagctgtataagatcagaatttgattctgatttattgatctcttgaacgattttttggcttggctgctgaattccggaggttacatactgatcccaatcgggagcggaattcttagccaaaagtgtccatgtattgttcgtaacaactgtccctttgcccattctgccttcgattaatccatccgccgtcaattcctctaaagctgtaatgactgtgctcctgttcacctcaaagtgtttggcaagcgtgcgctggcttggaatcttacttccgatcggccattctccatttcctattttctcttttataaattgaatgatttgtatgtacttaggaagctttctcatctttttttcttctggagcgctcattaaaagggtcctccttaaagtggttgggtcaaaatctatttaactggttgaagtcatctcatcaaatctttattaatatagaaaaacattaaataactggttggtttttgtaaagaggagtgagaaagatgagaaagaaaacagttcgaatcggcatagcttacagtctgatgattgggttgtgggcatcagctttcccgggaattcgcgcgagtttggagagttacacgccggaacacctcgctttgtttcgcttgttgattgggtcaatggcattggtggtttttgctgttttgactcatatgcgtttgcctgacatgaaggatatccctgctattttatcgttaggatttttaggttttgcactatatcacattttgctgaatatcggagaaaaaaacgtcagcgcaggggtagcaagcttactcgtgaccatgacacctattttttctgcaatgttatcccgtctgttttttggtgaacatttcggtttttataaatgggtcggctctatcattagtttattgggtgtatcgatcatttcatttggggcaggaaactatacaaattcagtgaacggcattttgttaatcttgctggcagctttttcggagagtatttatttcgtttttcaagcccgctatataaaaaaatatggatttatcccattcgttacattcactatttggggcgggacattgccaatgctggtatttcttccggggttatggggagaagttgttcacgcatcgatgaattccacatggtctgtcgtttacttaggcttattaccaacggttgtgccttactttgcacttgcgtatgtcacttcactcgtcggtgcttcagaagcagccatttcactttatttaacaccagccgtagccttggctatttcttgggtgtggttaggtgaagtacctgcgtttattgcactgacaggcgggatggttacagtcgccggggtgtgtttcacctatctaacagtaaataaaaagataaagattttaaatccttatttcttatctaaaaagcaataaagcagatgacatttaaccctgaaaatagagtcataagcagttctcctttttaatacttgggtttcgaaggcttcttctccccaagggtgccagtttacggggttgtgggcgttacctttgttcaagaaaacttgttgcaagcaaattcccccactcccgtaaagaattttgaaaatttacatggcagattgaacatttattgacaaagttaaaatgtaaaaaggtacaaagtgtctattgattaaattattcttttcgtttttattgcgattattgtatgtcttttgtttcttgacaggtttttcattttcacaaataaaaaaacacgctggaaagatgctctaacgtgtcatgatttacttcaaatgagatattgttcaacccattttcttgcaatgttttaatgttgtttactaaatcgggtaattcagcaactgctgattctaatgatgccactccaattacatttattttccttggatttggtgcgtcgagatctaaagggacgtcttcattggcaggtattaatccgggttcataagcaaaagaaagactttgagcaattatcctcttcactccaatttcatgacacgcatcaacagtatttcgcgcacctataattctgattctcgctttttcttcaagattgtaacctgttaaagaggtaaactgatggacaacaacctcaggttaaattttcctaaaagcattaagaacagcatctcgatccattgcatctgcttttacaggagttacccctattcttttgaggaacgtgttcgaccggttacctcgggtcaatgcaaatacttgatggccgttttgtattaatttaggaagaagggaccgaccaattactgcagtccccccagcaacaatgatcttcatgctataccttatttacctgccaatcttgaagcagcttcttcaacttctttatttgctttttgtaaaacatcctccggactcagtaaagctgttccttgcactcggataatttgataatcctcaataccgaggaaattgaacattgatttcagatatttatttgagtattcaacttcttcataccagtcatcatttgtataaattgatccgctagcttgtatgacaagcattcttcgtccatctttaagcagacctactgacccagtgtcagtatatctaaatgtttcacgtgcgatcataatattgtccatatagtcttttaattttgatggaatattgaaattatgcaaaggcaaaacaatgacatacgtttttgcacttttgaattgtttcaatacttctgtcatgcgtcctgttactttttgttcatcgcttgtcagttcttcgcatttttctgccttatcccatgcacttaaaactgttttatcaatcataggcacatcatcactatataagttaatttgctcaagctcttcactctctggaattaattctttgtaagcctctaaaaagtggttcattacccgtagactgtatgatgacgtatcatctacttttggatgtgcgttaatgataagtgttttgctcatttgaaactctcctttcattttatattaaagactatattaatcgacgattaacttggtcactaatataaaccttgtattttattttgtcaaacggaacaaatagtatctgaagaagggttttaagattgactatcatcaaaaatactcctaagatacaatgtgataaaccttaaaatcaaaagcaggtgagtttatatgcagtacagtgttggggttgaatatgctttacattgtctggtttatttaatagatgttccctccaaggaaagtgtcgggattcgggaccttgcagagttccaaggactttcagaaacatttctttcaaaagttttcggtaaattatctaaagctggtattgtaaattctgtccctggtgtaaagggaggatataggttagcaaaatccccggaggatatttccttttgggatgtaatagaggctgttgaaggaccaaaacccattttccaatgtaaaaatattgtaagcaatggtctactttatcgagacaaatgcaactcttgtgaatccagcaattcttcttgtacaattaacttggtaatgcttgaagcagaagaacagatgcgtaattatcttcgtaataaaacgctcgcatggttaaataaagaattggacgtagtattgcctaaaaaaacaaggacagatactcgggaatacttcataaaaaaaagctctgactaaattaattagtcagagcttttttgtgcttcaagatgccttcggagaatttttacgaaagtatggacgagacaacaaaatgaataaaactacagattaagtttaaccctccgattcggagagtcaaaggttaatgttcgcctttttgttctactttatgaaagggtcagcaattgctgatattataataattaatcaactctttgtggaatggatgataacaaatgacattaggccaaagattaaaatgggctcgaaaaaaatccggttactctaatcaagacgtgccagcagagaaaattggattaacagggtagacattgtctaattacgaaagggattatagatcgcccgatccggagacattaaagaaactcgctgatttatatgatgtatccactgattttttggtcggtagagaagaaaaggacagacccaaatctaaattggatcaaacagtcaatgaagcaattgaacaacttaaaaacgaagagactttacttttcatgaaagatgatgacattcaaatattatatgactataaataaaaaagtgaggttttatagacttcactatcaaacagttcactactcaattattttttcattgtttgttgttgcgcttgcgttttcaacactatgtgcttcaccatgaccaggtccaaaaagatttaatattacaactcctacaagtatcaaaacaatcccagtaacactggcaatgttaattttttctttccaaatcaaaatcgaaattattgtagtagcaatagtccctacaccagaccaaactgcataggcggtattcaaaggtatggacttcattgcaagtgataagaagaaaaaggaacctataaaagcaataattgcaccaatagtagggtaaagtttcgtgaagccttctgcggccttgagcatagaggaaccaataagttcaccaaaaattgcgagcaataaatataaatatgccattgttaattctctcctcctgtataaataatcaacgtcttataaatttgtactaaacctctatcgtttgtttcattatttctttattagttaccactttacaagaaacagcaaatgtttataagtctttattttgcaaaaaaattgtgcgcaaaatgactggtgttccttagacgagtagataaaatctaatctagttaatctaataaggtataaactaaactccattatggtaaagtaaaaatagcaaccaatttaaaagtgaaagaaggtgatccaatgccaaataacagtacacccaatagattaatcgctgagaaatctccatatttacttcaacacgcccacaaccccgtaaactggcacccttggggagaagaagccttcgaaaaagcaaaacgcgaaaacaagccggttcttgtcagcatcggctattcgacttgtcattggtgccatgtaatggctcacgagtcctttgaggacgaagagatcgccggtatgttaaacgataaattcatagccatcaaggttgatcgtgaagagcggcctgatgtggattccgtgtatatgagaatctgccagctgatgacggggcagggcgggtggccgctgaacgtgttcgtcacaccagatcagaagccgttttatgcggggacgtattttccgaagacgagcaaatttaaccgtccgggctttattgatgtgcttgaacatctgtccgaaacgtttgcgaatgaccggcagcatgtcgaggatatcgccgaaaacgccgccgctcatcttgaagtcaagattcacccggctgagggcatgcttggcgaacaggcggttcatgacacgtatcgccagctggccggcgggtttgacacggtgtacggcgggttcggccaggctccgaaatttccgatgccgcatatgctcatgtttctgcttcgctactacagctatacgggcaaggaacaggctttggccggcgtaaccaagacactcgacggcatggcgaacggcggaatttttgatcacatcgggttcggattcgcccgctactcgactgataatgaatggctcgtgccgcattttgagaaaatgctgtatgacaacgcccttctcctgaccgcctatacggaagcctatcaagtcacgggtaatgagcgctacaaacagattgcgatgcagatcgtaacgtttattcagcgggaaatgatgcatgaagacggcagctttttctcagctttagatgctgataccgaaggccgtgaggggaaatattacatatggtccaaaaaagaaatcatgaatcttctcggtgatgaactcggcccgctttattgcaaggtgtataacatcacagatcaaggcaattttgaaggcgaaaacatcccgcacctcattttcacgcggcgtgaggccatcctcgaagagaccggcctcaccggacatgagctggccgaacgccttgaagaggcaagaacaaaattgctggaagcgcgtgaaaacagaagctatccgcatacagatgacaaagtgctgacctcatggaacgcgctcatgattgccgggctggcaaaagccgcaaaggtatttcacgagcctgactttctcagcatggcggaaacagcgatccgctttctcgaacgtcacctcatgccggacgggcgcgtcatggtccgataccgcgagggcgaagtgaaaaacaaagggtttatcgatgattacgcttttctcatctgggcttaccttgaattgtatgaagcgggttttcatccgtcttatctgcagaaagcgaaaacgttatgtacaagcatgctggagctgttctgggatgaacggcacggaggttttttctttacggggaatgatgccgagactcttcttgtcagggaaaaagaggtttatgacggagccgtgccttccggaaacagcgcggctgccgtacagttgcttcgtctcggccgcctgacgggtgatgtatcactgattgaaaaagccgaagcgatgttttccgtgttcaaacgggaaatagaggcctatccgagcagcagcgctttcttcatgcaaagcgtactggcacacacaatgccccaaaaagaaatcgttgtgttcggaaggaaagatgacccggacagaaaacgtttcattgaggcgcttcaggagcatttcactcccgcctatacgattctcgccgcagaacatccggatgagcttgccggcatttctgactttgccgcgggttatcaaatgatcgatgggaagacaacggtctacatttgtgagaatttcgcctgccggaggccgacgacggatattgatgaagcgatgaacaccttacaaatcagcagcagagcctaggcggcctgctgcttttcttttttcacaaaacggaatgcgagccatgcgaagatgatgttgatcaccagagtcgatatgcaatcgtatatttcatagccgccggctgctgttgtaaatatcgacggaatgccgccgtataccgaatgatcctctgtgagaaagataaataaaaacatattattggcagcgtgaccgccaagggacatctccagactgcccgttttaatcgtgataaaggtccagatcatgccgatggtaacatatccgattcccgcccagagagctccattttccatctccggatttccgaaatgaagtgcgccgaataatccgccgataatgaccgtcagaaccaccgcgtttgccgtcaattttccggcaaactgaagcagaaaaccgcgaaagagaaattcctccgcagaggtttgaatcggcaccaacaagacggccgccgctaacagcagcagaaaacgtgaagcatggaattcctgaagcgtgaaacgatccggatgaattaaaaaatcaatcagccccgcgacaaacatcagcacaacatatgtgccgaatccaaagaaaattctcttccagttcagcgactgattcggtgtaatgatggataaaaaccgccgcttcataatgaaacgaaccgctatccaaatgcccggaatcgctatgaaatagacgatatgctgtaaataaatatccgccagcgggtcacttaatgccgcctcatcccaatttatcgtcagtgaaggattgaaagcggacgtgagaaacatataaaacacggtcagtatgcttccgaaaaagaacaaacccacaatgagcaacagagaaagaagatatctcgatacactatttcttccctctgcgggccgtacaaatgtattcatatttatgcatcaacttcctttccttcaacattttacaatataaacagaaacagatataggaaatgttatatattttaagaagaaagcgctatgccgtttcctttggctctggttatttacactctgtttttgccaaaaaaagacctttataatgtattcgtcagataaatttacagtattttctgattacaattgctaagtcagggggttttttatgaaacatcagacattctcaaatgtagcgaaccgattagaccgtctccccatttcgcgtgtgcactatcaagtattaaccgctctcggaatcatctattttttcgatctcgctgatctgtttacgctcagcaacgtggctccggcgctgattgagcattggggcgtgaagctgtccgtcattgccgacgtcacagccgcatccttcctgggcatgtttttaggcgcctccatcggcggaagactgtccgatcggatcggcaggaaaaaagcgctgaattgttttgtccttgtcttttcgatctcatcttttctgaatgcgctggcatgggacattccgtccttaatgattttccgcttcttgaccgggctcggcgtcgcggccgccatgattgtgacgaacagctatttggcggaattttttccatcatccgtacgaggaaaatacatctccttttgcgccatgatcggactgatcggcgttcccgtcacaaacgttgtttccgcttttgtcattcctttaggctcatgggggtggcggctcgtattcgtatggggggcggccggtctcatttatttcttttttatccgccggcttgaggaatcgccgcgctggcacgaaaatcggggcgcatatgatcaggcaaacgccattatgaaccgtcttgaagcacgtatagagaaagaaaaaggcccgcttcccgcgccaaaagaggcggcagaagtacatacagtgaagcacgcaggctacttagggctgtttcagggcaggaatttaaagatcaccatcatcctgtcagcggtatggattcttgaaacctttggcttttacggctttgcttcatgggtgcccagcctgctgaaaagcaacggcatcaccatggaaaaaacgctgtggtacaatgtgcttcactctgtcggcgcaccgcttggcgcattgctcggttccatgatatccgagacgttccaaagaaaatggattctggccgcaagcgcttttctgactgccattgccggactgttatacggcatgacgtttattcccgtcatgattattgtgtttggatttgtcgtcaatgtcacggaacgggttttcacctcaaacttatacgcatatacatcggagccgtatcctacggaatatcgctcggccgggagcgggctggcatacgggctcggccgtttttccaatatattcggatccctgctcgtcggatttattgccgttaagctcggctacatcagcgtctttttgttcatcggcggctgctggcttctatgttccgttttgttaattctattcggtccgaaaactaatgctcagcaaatttaatcaataaaacagtgcgggttccccgcactgttacactgtgatttctatcaaattgccttccccatcctctatcacgctctcataatatccgtcacccgtcacgcgcgggccgcttacaacctgaaatccgtcatttttaaacgtctccgtcaattcattcacccgctccttgctgcctgtagaaaatgcgagatgcgcccatccggtcatattctgtgacggagcttcatcaatgccgccttttttcataagttccagcctgcatccggagtcaaacgaaagaaaatacgatttgaaatcttttttctcattatgataaaggtcattggccttggcgccgaagtatttctcataaaattctttcatccgttctaaatctttcacccatatggccgcatgttcaattcgcatatgtccgcctcctttttttttctcaatctagttataaagcatgaaacccatttcagctcaagactttttccgctgaaattgatgcataatttgttttttagccgtttctccgtgcaaaaacagcaaaaatgcttcccttccgacccgttccaaatgaagttccagagatgggatattcaatgcccggctgacgctcaggtttccctcgccgatgatctccgcgtcccatttctgttctttcgcaaactggtacaagccggcagccacatcatcactgtgcgcatagatggccgtcggcgccttgtggaaaccccagaagtgttcacctgcccgctttccgtcgtccatatcatggcatccgatcagaatgcgggtttcatcaagagagccgaaaaccgccttatatgcggttaccttgtcggccgtactcgggcttttttccgcttcccgcacacatgtaaaagcaacatcttgatgcccgcggtttttcaaatacaaaaagctttctctgtaagctgcctgcctgtcattataagcgcagggaatctcttgatgctgcgtatattcacaagcgacaatgggaccgtactccagataaggcacagcggtttcccattcattcgcgcgggacgtgacaatcagtccgtcaatctttttcattttcagcagttcgaaataggtcatctctatagcggggtcatagttggtggggagaagggttgtcacgtaatcatgggcaaacgcttccttcgtgataccgtttacaattttgtcaaagcagggatggtcgctgtacggcaaaatcacgccgattgtattggtctttcctcgaatcagatcaatggcggttcgattaggggtataatccatctccttcatcacttgattcacaagacgccttttctcctcagatacgtacgggtgtcggtttaatacgcgtgatacggtagccaccgacacattcgccagtttcgcaatctcttttatatttgccatgtgctcctccatttttggtgataaaaaagcagcaagagtggatttctcttactgctatctcatcataaatccactgtcatttcaacagggcaatggtcagaacccatgatatcggcgcaaatggccgcttcgctgatccgcggcttcagtctgtctgaaacaatgacgtaatcaagccgccagccgatgtttttctcacgtgcgttcgtcctgtaagaccaccaggaataggcgccttcccgatcaggatataaatagcggaatgagtcggtaaatccggtgttcagcagggcgctgaacgcttcccgctcctgatccgagaaaccggcgttcttccggttggctttcggattttttaaatctatctccctgtgtgcgacattcagatcgccgcataatatcacgggcttcttccggtcaagcttctgcagatactccttaaaatcggcttcccattgaagacggtaatcaattcgctctaatccgcgtttggcattcggcgtataacagttgacgacgaacaggttctcaaattcaagtgtgatcacccgtccttcttgatcatgatcgtcaattcccagtccataaaacacgtgaagcggcttttctttcgaaaaaacagccgtgcctgagtagccttttttcaccgcgtagttccaatagtcatgatacccttcaagctgtaatgatacttgtccgtcctgtactttcgtttcttgcagacataaaatatcggctttcgtttcctgaacgtaagtattgatatctatctttttcatcacggcacgtaagccgtttacattccaagaaatcagtttcatgtgttccccctgtccggctcagccggcattccagtgtttcaatgtttccgccctctaatgccagcatctgctttttcatttctaaaccgcctctgaatccggtcagttttccgttttttccgatgacgcgatggcacggaaccgtaatcaataccggatttttcccgattgcggcgcccacggctcttacggctgccggtttctgaatcatttctgctatatccgaataggagtatgtctcgccgtacggtatgtccataagcgctttccatacagcaagctgaaattctgtcccgtaaagatccaccggcactgaaaaagctgatctgccattttcgatgtactcggacagctctgccgtgtaagacgccagcttctcatcatcacgtgccaatcggtattgcggcagtgatttttttgcccactgctcaagctcttcaaagcttccatgatttgaacctataaagcaaagccctttagatgtggcggctgtatacaggctccaatcattccgtgtgaaaagtgtccaatagaccattgtctctttactcatattgaacctccctgtcccattccggcagtttttcggtattctgtgggcgaattcccggttctctttttaaaaagagtggcaaaatgcgctgtgtttggaattccgaccgtcagagcaatctccatgactgtcatatcagtatgctttaaaaggtgttccgccttcgccaatcttatgttctgtatatactcaatcggggatattcccctgatttttttaaatgtccgctgtaaatgataagggctgccgtgacacatttcggccagtacactcagagtcagagattcgtgataatggcggtcaatgtactcaatgatttgagcaatccattcttcatcaggaagacgaagaccgttcggccggcaccttttacagggacgaaaatgtttatcaagcgctgcatcagccgtatcaaacaccagcacgttttctttattcggagctctcgatttacaagaaggccggcagaaaatccccgtcgtctttactgcataataaaatgccccgtcataagaagcatcattgcgtatgattgcgctccacttttcatcagtcaggatatttctgtctgtctccatctcagccaccccctgttcttcagtataaacaaattcattgcataagtacgcgtatttgaatagaggagcaagataacaaagatagatgtcaggagcacttccatgtttcatgtgaaacatttcggcaggatggaggaggactgatataaaaaaagagcaggagcccgcaggctcttgctcttttctttcggcttactcgccagttacgtatggaagtaaagccatttgacgtgcgcgtttgatcgcgatagtcaatttacgttggtatttcgcgtttgttccagttacacggcgaggtaagattttaccacgctcagaaacaaactttctaagaagatctacatctttgtaatcgatgtgcgtaatgccgttagaagtgaagtaacaaaccttacggcgtttcgcacgaccgcctctgcgtcctcctgccattgtcatttcccacctttctcgttatgaatatagcgataatctattagaacggaagatcatcatccgagatgtcaatcggcttgccgtcgttggcaaatggatcatcattaaagctgttcccttgatttcgtctctggttgttctgatttccgccgaacggattatcattttggcctccgccaaagtattggcctccgccgctgtttccttcgttgtatccgcctgatccagaaccgccgctgtttttaggctcaagaaattgaacactttcagcttggacttctgtcacgaagacacgctgtccctgctgattttcataatttcttgtctggagtcggccgtctacgccggcaaggcttccttttttaagaaagtttgcaacgttttcggcttgtcttctccaagtgacacaattaatgaaatcggcttcacgttctccggactggttcgtgaatgtacgattcacagcaagagtaaacgtggcgacagccgcaccgcttggcgtataacgaagctctgggtcttttgtcagtcttccgactaatacaactcggttaagcatatgaaagaccaccttttaacattatatatttcaaattgcttattcttcttctttaacaacgatgtggcgaatgatatcgtcactgatcttagctaaacggtcgaattcagcaaccgctgcagcttcagactgaacgtttaagatttggtagaaaccgtcacggaaatcgttgatttcgtaagcaagacgacgtttaccccaatcttttgttccagtgatctccgctccgttagaagtcaatacgttgttgaaacgctcgataactgccttctttgactcttcgtcaatgttcggacggataatgtacataacttcgtactttttcatctgtttgcacctccttttggtctaagcggccctataatgggcaaggagcaataattctattactcacaagtttatattataccaaagctcttgtccctttacaactgtgtcctatacattaaatcggaaatgaatgacatctccgtcttggactacatattccttaccttccagacgcacttttccggcttctttcgctccggacattccgccgcctgccaaaaggtcttcataagcaaccgtttcagcgcggataaagccgcgttcaaagtcagtgtggatgatacccgcacactcaggagctttcatgccttttctgaatgtccatgcgcgcacttcctgttcgcccgccgtaaagtatgtcgcaaggccgagaagagagtatgacgctttaatcagctgatcaagacctgattcttcgatgccgagctcctcaaggaacatttgcttttcttcgccttccaattcagcaatttcagactcaattttcgcacagacgacgataacttcggcattttcacccgcggcgtactcacggattttcgcaacgtattcattgtctgaaggatcagccacttcatcttcgcttacattcgccacataaagcacgggttttgacgtaagcaaatgaagctgcttcacaagcttttgctgttcttccgtaaattcaacggaacgggcaggcttttcttgttcgaaagcttctttcaatttagacagaatgtcaaattcaaaaaccgcttctttgtctttttgcttcgcaagcttgcttacacgcgtgatgcgtttttcgactgtctccatgtcggcaagaatcaattcaagattgatcgtttcaatatcgtcaatcggatcgactttccctgacacgtgcgtaatattgtcatcagcgaatgcacgtacaacgtggcagatcgcatcaacctgacggatatgagaaagaaacttatttccgagtccttcacctttagatgcgccttttacgatccccgcgatatcagtgaattcaaacgcagtcggcactgtttttttcgggttcaccaattcagtcagcttttgcagacgttcatccggcacttccacgattcccacgttcggatcaattgtacagaacgggtagttggctgattcggcaccagcctgggtaattgcattaaataacgtcgattttccgacattcggcaaaccgacaattccagcagttaaagccattctttcatctcctctatatcaaaccatcatcgtataaacgtattgtaaacctagagcaattataaggaggttcataggaaaagacaagctgagaaaaaagcatttcccgccctctctctccttagattacccttttttaaccgctaccagacagtcaaaaagcgtacttcccattccattatcggaatttgaatcctttgtgagcatgttgacggagcctccgaatgccgcccacatgccttcatctatattcaccgtcttcgggtgagcctgcttcatgattttcaccctgccgcgcagacggccgcggtcattgtatacctctgccgtatctccgtcttgaagtgaaagctcctcggcgatatccggcgacaggtccacctgaatctgctggagcttttcaataaacggcacgtgctgtgaatgattggagcgctgcgggtgaatggacagcagcgtatacggatatttcccggccagtccggcgtcgtgataaacggactcctccggcacttccaattgagggaggccgctgtatcctttctcttctgccagtgacgagacgaattcaaattttccgctcggggttaaaaattgaaaatcactccacggaacctgtttaaccggaagcggcatatgtcctttttcctttaattgctcaagggtgattccttctttctccaaagaagagagccccatttttaagaaatcttccgcactgtaatcaaacagctccccgaatccgagacgctttgcgagttccgtccagatccagcggtctgattttgcctctccctgcggttccgcaagcttcttaccatattgaacatagtgatgatacatgctggaataataaatatcttcctcttcgaaaacaacggccgtcggcagcacatagtcacagagcttcgccgtatcggtcatgaccgaatcaatggccactgtgaccggcgttttttcaaacgcttccttcactttttttgtattcggcacctgtgtcagcggattgccgcacgtcacgatgatcatctcaatcggcgggtcggctgcattcagcgcctcttcagcttgagtcatcatcgaaaacgttctcgaacttttcttcaaatcaggacgagtgagctcggcctttgcaaagctttcaccgacttgcacatttccgaagttggcgccgccgcctttgataccgacatttccgctcgccgcagctaaagcgtcaatccaccgtatcgtcccgcccccgtttttatatctctgcatcccaagacccataaaagtggaggcgggaccgtcagcatataaatcggcaagatattcaagcgcttctaaagacgtttctgttttctcaatgatctcctcaaaagaaatcgtctgcagaagcttgtctatttcctcaaaaccgaccgaatgcttttgaataaaatcagaatcggttctgccggtttggcataatatttttaaaacacccgccgcaagccagccatccatgccgggtttgacggatatataccggtcggcaagctttgcagtcgggttaaaaatagggtcaatgaccgtcagtgtcgctccttttttcttcacctgctgcagatgatgatagaggtgcatattcgtccgggacacgtttctgccccatacgatcacatgcttgctgtgataaatatcaagcggtccatgcccgtaagaacgcccgaaatcccagcgctgcgcttcaatgccggaaccccagcaaatgctgcccgcaatctcggttacaccgccgtatccattgaaaaaacgctggtcgagcgccttcaaaagaccgttattggcgtagtcatgactgtgcagcactgcggcagtgcccaacgtctccttaatcaccgtcattttttcagcaatttcatctaacgcctgctcccaggaaatgcggacaaattcgccgtctttcttttttaaaggaaaacgaagccgttccggcgcattcgttttcgtctccagcattctgccccggccgcaaattttcccttccgtaatgggatgattcgggtctccgtctactttcgtcacctttccatcctcaactgtcaccaaaaagccgcagctgtcccagcaattcagcgggcacgctgactgatgcactttgctcatcgggcctcttcctctcctctatatgaaaaagcatgagcgccagcccttatgatgtaggctcctcatgcttgacgagtacttttttcagctttctctcaaaatctcttctcggaatcatgacactgtgggaacaacccgtgcatttgatccgaatatccattcccatccgaatgattttccacctgttttcaccgcaaggatgcggtttcttcatttcaacaatatcattcaggccaaagtctttatccgccaagacccttcacctctctccatagactgctttatttattgtacaaaaaaagacaggataagagcaacggccgcactcaaaatgagcattatacttttttccatctccctaaaatagggtaaagaagaagacataccagcaaataaagacttaaaagcccgtaaatgggatataaaatggcgatcaaatctgaaaaaccgattgtcgtaaaaggcaccatcacagctaaaagaagagatacgagcgtccatctcggcaatttcacaaatgcaagcatgcggctggacagcccgaaaagaccggtcaccgttgtcgtatagatggctaaaaaaagcacggcggccatacaaagaaataacggataaggagcgccttcaaggacggcgaaaagaggaatctcatattgtgtaagactgcctgaaagctgtacaagcgtttcattgtaaacaaatgaaatcataccgaaaatcagcccgcttgcaacgcttgcgattttggcttctcccagtcccttcatatctttcccgattgaagaaagaacagcgacaacagaaagaatgtttaaggacgtgaaggtaatgcttgccggccaattatactggcgggtcaagtctatcgtccacgtgtaatgatgcgttgtctgaaaaaagaccaatgcatataacagccccgctacaagaatcggtatcaaaatactattcagagataatatcccttttatatcccaaaagaataaacccacggtcacaatgcaaagaagaaaaataccgatccaaaacggcagcttgtacatttgcagcgtcacaccgccgccggcaatcataaccatcgtcattgaaaacaaataaaacataataagcacatcatagactttagcaagagccggtcccatcagatgctcaagcacaggtaaaaagtgcgttgattgaacccgatagctgatcttcaacacaatataagccgaaatcgtaaacatgactgtaaacaatacaatagccagtccgctttcgacaccgaaaaactgccatatttcctgcccgcttgcatacccggccccaatctggctgcttaatatgagcagcatccacttcatcccggctctccacaccctcatcacctcataaaatttctgatcatctccgcatattgctactatattgagtgacagcagcaaacattcatacaaatgggacaaatatggtatgataacgacgattgactattcagaaaatttatttatgttaggcgctcaaatcatggacatcaggcgtttaaccgcaagtgatacccagccttactccgattcaggctcaaagctttaaaagatcacccggacgcaatcgccgtcagctatgaggccgtccgaaaaatgcaaagccaggcttgaagccggcaatgccatcttgcttggcgcctttgaacaagacagcctgataggaatcctcaagatctccaagcatctgctgtttaaactaagacacattgcggttatcggttctatgtatatttcccccaaacacctagggtcaggcgcgggaaaagctttaatgacggaagccatcagccgggcaaaaaagatgaaagacacagaacagctccatctctctgttacttcaacaaatggaacccgcaaaaaaactctgcgctcagttaggattatcctcttctctgcagaaaaaagagcgctggaattagatcatcagcaatatgttgatgtagatcatatggtcttatttctttcatgaacttagagaataactgctctgagttcttttttctatccgctcttttcaaacaaccggcatgctcatcatgacataagcataaaaaaaggcagcgctggatatactgtaaacaaccatacatcaccaaaaacaacaatgtaatactcgtatgacatgacaaggaagtgaaccttatgaatcgaaaaggcgggcttttttctcaagaacgggcaaaacaatatgtatcccatacggattcttctgctgcgaatcaaatacaagcaatccttacttcatctttacgtaaagcagccggcagaccgttagtcaccgtgtgtatcggtacagatcggtcgaccggagattcattaggtccgctcgtaggaacaaagttagaaaaaatgaatttaggcagattgcacgtttacggcacgctgtcagatcctgttcacgccgtcaatatgaaagacaagctgaaagatattcaacatctacataaaaatccgtttattatagcggttgatgcttgtttaggccgcgtcaaaagcgtaggctcatttcaaatcggcgatgggccgctgaagcccggagcaggtgttcaaaaagaccttcctgaaatcggtgacgtccatatcaatggaatcgtcaatgtcagcgggtttatggagtattttgtcctgcagaatacgaggcttcatcttgttatgagcatggcaaatgttttagcagaggggttacagctgacagataaatcagaaggccggcaggaacggctcagtccgtttcataagctgacaagacgtatataaaaaaccatcttttttaaaaaagatggtttttacgcttctctttcggacaatagttccaggatacgttcaagatcttcatttgagaaaaactcaatctcaatcttcccttttttcttttgtctcttaatattgactgttgttccgaagtaattttgcaaatacgattcccgctcttttaacacaacatcttgaacaggttcttttttctttgtttcacgtggaacattgttgtttaactgctgaatcagctgctcaagctggcggacgttcagctgttcttcaaccactttcttcacaagcggttcaagcttgtttttatttttcaagccaagcaaggttctgccgtgtcccatggataacgtaccttctgcaatgaggttctggatgctttccggcagcgtcagcagtcttaaatggttggcaatatgaggcctgcttttcccgagccgtttagcgagctgttcctgggttaaatccaaatgcttcagcagtgagtcatatgccagagcttcttcaagcggtgataagtcttcacgctgaaggttttccaaaagagcgatttcccgcatcagcgattcagataaatcccgcacgatagccggcactgtctctttaccggcaagttttgcggcgcggtaacggcgttcgccggctacaatatcatagcccttcaatgattttctcacgataatgggctgaagaatgccatgctgaatgatggattccttcagttcagctaatgactcatcatcaaattgttttcttggctgataaggattggggcgtaaatcactgattttaatttcttccactgtctcttcagacaaatcaacctgattaaacaacgcgttaatcccttttccgagcccgcctttagccattcgctgccacttcctttgctaaatctaaatatacttccgcacctctcgaacgcggatcgtataatatgatcggcttgccgtgactcggcgcctcacttaaacggacattgcgaggaataatggtttgatacactttatctctaaagtatttctttacctcttctatcacttgaatgccgagattcgttctggcatcaagcatcgtcagaagcactccttctatcattaagtcggtatttaaatgtttttgcacaagccgaactgtatttaataattgactcaatccttcaagagcgtagtattcgcactgaaccgggataacgactgaatctgaagcggtaagcgcattaatcgttaataacccgagagacggaggacaatcaataatcatgtaatcgtaattttgtttcacagattctaatgctcttttcagcctgacctcccgtgagatcgtcggaaccaattcgatttccgctcccgcaagctggatcgtggccggaatgacatctaagttctctactgaagtcggtttaataatatctgtaacatctgcatcatctactaaaatgtcgtacacacaatgatccacatcggctttttcaatccctaatccgctcgttgcattgccctgcggatcaatatcaacaagaagaacccttttacctatgtaagccaagcaagcccccagattgacagaagtcgtcgtcttcccgactccgcctttttggttcgtaattgctatgatttttcccacgatgtcacctaccttcacatgaacatgtactgtcttgtttctatcttatcaaaaaaagagtaaagcgttttatttttttcataatttgtttatcagcaagtgaaaaaaatgtaaacgaaaaagacactttctaatataagttctccgataaagtgacttttttgactgtaaaaagacaattcacgacacaaaaagataaaattttacatatataatgtatagtgcacaataaatctatcattatctcaaaatagttttttgattaaaataaaaactcccctgctgatcaggagagtttttatttaggtatccgaatggtaagctggatgtactcttcgaattcttcttcttcagtgttcagcctgacgccgctgtcttccaccatggacagtgactgacgaatcgtattcatcgcaattcttgtatccctgctgaacgctttgcgtctcggctttggtttctgcttattctgttcaagcattttcaccactctgtcttctgtctgcttgacgtttaagcttttctcaatgatttccgcaagcaatgtgacctgaaactccggctgtttgagcggaatcagtgctcttgcatgacgttccgtaatttttttctccataatcgcatcctggacgggttccgggagctttaacaatcggagcttgttcgcaatcgttgactggccttttcctaagcgctgcgccaaggcttcctgtgttaaatcatgaagttctaacagccttgcgtacgcatgagcttcctcaatggaggacaattcttccctttgcaggttttcaatcaaagcgacagatgctgtttccgtatcagaaaaatctttaataattgcgggaatcttctcccattcaagcgtctgtaccgctctccagcgcctttcacccgcaatgagctcatattgtccttcatcttctgtatgtctgacaacaatcggctgaatgatgccgtgtgtatggatagtcattgctaactctttgattttttcatctgagaaaatggtgcgtggctgaaaacggttgggaacgatagcatgtaccggtatttcgagtatctcttctttgtttgtatcatgctcagctatctccggttcctcttccttctcaccaaacccgaagaaacgagagaatgaatgcttcatgtacctacaccacctttaaaaactgccatttttataattctattttctcatggtttttcctgctgtatcttcatcaattttgcagaaaatatgatggaattgtcacatcaggctgtctaaattacccttcaattggcgatttatttggagtacccggttttctcggatattttttcggagtgcttttcgtcttgcgaatgatcataatgttccgttcactttcttcaacgggaagtgtaaaggaatgaacttgttcaagctctcctcccaatactttaatcgccttttgccccgctttcagctcttcatcagcggctgcagcttttaatgccgcaaaaataccgtttttcttggccagcggcagacaaagctcactcaggaccgacagacgcgccaccgcacgggccgtcacgagatcgaagctttcccggacgtctttccgctgtccgaatgtctccgctctgtcatggacaaatgtcgtatgctctaattgtaaagcatcagagagagtttccaaaaacgtaatccgcttattcagtgaatcgacgatggtgacatgcagatgcgggaagcagattttgacgggcaggcttggaaaaccggcgccggcgccgacgtcacaaagagtggtgaccttttcaaaatcaatataaaatgccgccgttatcgaatcataaaaatgcttgagataaacttcctttttctcagtgatggatgtcagattcattttttcgttccattccacgagcatccggtaatacaactcgaattgctccagctggcggtcagaaagggaaatccctttctccgctaaactggatgtaaattgctctatattcatgccgtcatcctttctattcagctaccttggcaatacggccctgctccaggtataccagcaggattgaaatgtctgccggattgacgccggaaatacgggacgcttgagcaactgataaaggacgcacttctttcagcttttgacgcgcttcagtagcaattcctttaatggcgtcataatcaatccgatcagggatttttttgttttccattttcttcagcttttccacttgctgcaaggatttttcgatatatccttcatatttcacctgaatttccacttgttccgccacatcttgcggaaccggagaatctgcaggcgcaagttttgtcactgtttcatagttcatttccggacgtttcattaaatctgtgccgcgcactccgtctttcagctcgcttccgccgagtgaacggatatattcctgattctcaggagacggcttgataataacagaccagagacgttttttctctgcctcgatcgccgcttttttcttctcaaacgcttcatagcgctcatcagaaattaagccgatctcatggccgatttccgtcaggcgaagatccgcgttgtcgtgacggagcagcagtctgtattccgcccgtgaagtcagcagacgatacggttcattggttcctttcgttaccaaatcatcaatcaatacaccgatataagcatcggaacggctgaggatcacttcttcttttccaagcgctttgcggcctgcgttgatccctgccataattccttgcccggctgcttcctcataacctgatgtaccgttaatttgaccggctgtgtacaggttagggatttttttcgtctccagtgtaggccagagctgcgtcggtacaatcgcgtcatactcaatcgcgtatccggctctcatcatctgcaccttttccagtcccggaatggtcgccagcatccgctgctgcacgtcctcaggaagactcgtggatagaccctgaacgtatacttcctgcgtatttctgccttccggctcaaggaaaatctgatggcgcggtttatcattaaaccgaacgactttatcttcaatcgaagggcagtatctcggtcccgttcctttaatcataccggaatacatcggcgaacgatgcaggttgctgtcgatgatctcatgagtctcaggactcgtgtaagtcagccagcaaggcagctgatcggtaatgtattcaaccgtttcatatgagaaagcgcgcggaaccgggtcccccggctggatttctgttttgctgtaatcaatggaatcgcttgagacacgaggaggcgtgcccgttttaaaacggacgagatcaaaaccgagctcctctaagtgctcagaaagtttaatagacggctgctggttattcggaccgcttgagtaagacagatccccgagaatgatccgccctcttaaatacgttccggttgtcagcacgaccgtttttgccttgtattcagcaccggtttgcgtaatgacaccgcggcactctccgtcttcaatgattaaacgctcggcaatcccttgaagaagtgtcaaattcggtgttttttccagcgtatgcttcatttcgtgctgatattggaatttatccgcctgcgcacgcagcgcccgtacggccggaccttttcctgtattcagcattctcatttgaatatgagttttatctatatttctagccatttctccgccgagcgcgtcaatttcgcggacgacaatccctttcgcggggccgccgacagacggattacatggcataaacgcaaccatatcaagattaatcgtcaaaacaagcgttttggctccctggcgcgcggatgcgagggcagcctcaacaccggcatgcccggcgccgatgacaatcacgtcgtattggcctgcttcataccccatggttttttcctcccttttatttacctaaacaaaattgtgaaaagagctgatcaattaagctttcgtgaacggcatcaccgatgatttcgcccagcagttcccagcaccttgtcaaatcaatttgcaccatatcaatcggaacatcctgttcaatcccgttcagcgcatcatcaatcgcttgctttgcctgatgcagaatcgaaatatgacgggtgttgctgacataggtgagatctccgctttcgatcgctcctgtataaaatagcgactgaatcgcttcctctaaatcttgaatgccttcttctttcagcaatgaggtcgtgacgacaggccggcctttcgccagttccttgacgcgctcagcgtcaatcttagcctcaaggtccgtcttattcataatgacaatgacgtccattccctcaaccgcttcaaacaatttcacatcttcttcagaaagcgcttcgctgtggttaagcacaagcaaaatgagatccgcttccttcagaacctgccgtgaccgttccacaccgattctttcgacgatgtcttctgtctcacggattccggcggtatcgacaagccgaagcggcacgcctcgcacgttgacatattcctcaatcacatcacgcgtcgttcccggaatatcggttacgatcgccttcgtttcatggacaaggctgttaagcagagaggatttcccgacgttcggacggccgatgatcacggtagacagtccctcacgcaaaattttcccctgctcagacgtacggagcagcgcctcgatttctttcttcacgccgcttgccttctccactaaaagctgatgcgtcatttcttcgacgtcatcatattccggataatctatatttacctcaacatgggcaagtgtttctaacaactcatcacgcagacggcggacaagcgcggaaagccgtccttccatctggttcatggcgacattcatggcacggtccgttttggctctgatcagatccatcaccgcttccgcctgtgaaaggtcaatccgtccgtttaaaaatgcgcgcttcgtaaactcaccgggttctgccagtctcgcaccttctcttaaagcaagctggagcacctgattaaccgtcacaatacccccgtgacagttgatttcaatgacatcttcccttgtgaatgttctgggcgctcttaaaacagacaccatgacttcctcaataatccgtcccgtcgtactgtccgcgatatgcccgtaatgaatggtatgcgattctgccgaactgagcgttttgcctttcggacccttgtacattttgtcggcgatctttacggcttccgggccgctcagccgaacgatcgcaatcgcgccttcacccatcggagttgaaatcgctgcaattgtatccatactgttcacctctctttatctctgtttccatctatataaaaaattttatttacgccaaaattaaaagataacatagtttggtttgaagtggaagatacgttatccacaaaggcagaaattcatcccttattactttaacttatccacatgtgaataacaattaattttatttcctaaaaccttttttatcaacagcatagacctaaaaagaaaaaacttaaacgcaaaaaatgcgattctgctcaggaatagagccatttttaccaataaaaaaaccgaagttccgattttacccggacttcggttttctgctatctttatgggaaataacgagatggcggtaccggccttcaccggtagaaaacgttttgatatttggatgctttgacagcgcgtcatggatgatttttctttcacctgacggcatcggttctaaatgcacctcttttttcgttttcgacacttgcttggccagcctgtttgccagctgatccagaatttctcttcttttccgccgataattttcagcgtcgacaacggcttggcgatactggccggagccgcggttcaaaacaagctgcgtcaatgtttccaaggcattgagtgtttgtcctcttttgccaataagcagcgccgctttttcacctttaatatgaaaacagactgttttcttgttttcttccgtaacaatctcagaaggcccggcaatggaatggatgatttcttctaaatacgctttcgcttcctgaacaggatttcttttctcttccagttctacaatcgcattcttttttccgaaaatacccaaaaaccctttatattcttcttgcaccaccgttatttctacttgatctttcgtcagttgaagttcctgaaggcctgattgaactgcttcttcgacattccgtcccgcagcagtcaccttcttcactttttctttcctccggctttctgcgtttccggatcgtgtttaatgtcaggtcctttaataaggaatgtctgagcaatcataaacaggtttccgactacccaatacagagaaagcgcgctcgggaagttgatcgcaaatacgatgatcatgatcggcataatccataccatcattgccatttgaggattctgagtcggatttcccgccatcatcagcttctgctggacaaaagtggccacaccggcaacgataggaagaatatagtaaggatccttctctcctaaatcaaaccataaaaagctgtgctgtgaaatggcttgcgtacgcataatggcgtggtagaatccgatcaaaatcggcatttgaatcaggatcgggaaacatcccgccagcgggtttaccccgtgctttgaaaacagggccattgtttcctgctgaagcttctgctgcgttttttgatctttagagctgtatttttctctgagcttctgcatttcaggctgcagcgcctgcatcgcttttgagcttcgaagctgcttgatcatcagcggcagaatcagcagacgaattaaaatcgtaacgatgatgatcgacaaaccatagttatcgcccgtcagtttcgctacgtacgtaatgacttctgacaatggatacacaacatatttgtcccagaaatgcggactattcgccgtaatcggctctttcacactcgagcacccggccagcagcacgagcataccgaccatactcagtagtaaccatattctccttttcaagaacgtttcctcctataccaatctttataaaccttgtatgtattttagcatctttcagtttcaaatggcgttcatttttcgccaaataaaaggaagcgcttttaaaaacgtgaagaaaacaaaatatgagctattttgacgaagatttcttatataatgaggtttttctgaataagtgctgcagactctttttcgtttcttcaaaactgaggtcgccggcgggttttcttgcgataataataaaatctttcggcttgagcagctctttttcctcctgaaccgcctgcctgattaaccgcttcacccgattgcgcacgacggcattgccgatttttttactgacagaaagccctacccggagctcttcctgtttcggctgatcaagcgtatacagcacgaactggcggtttgccatagacgttccgcgtttaaacactttttgaaaatcttcatttttctttaaccgatttcgcttcttcactttaattcactccgatattcactcgcagaaacttttatttctatctaaaaaaaacgggccgccggaatactgaagaaatttctccagtaccgggcgacgcatgacatctcttttctcttaatgtgaaaaaagaccactgacattattcagtggcctaagctgataatacttttctgcctttgcggcgacggcgtgctaatactagacgaccgttttttgaactcatacggcttctgaagccatgaactttactgcgtttacggttattcggttggaatgttcttttcatttatgacacctccctcgaggaatagctgttaaagacagtcttacttattatatttgtgctgcctattcattgtcaacttcagcagtgcttttatttcttacaaccataataggataacataccttaaccagattagaaaccttatttttcatattcctttttttaacgcacaaaaaaagccgcgctcccccgaaaaaacgacatgtggataatttttcggtctttttttaatatccacaatcgttatcgacaacattttcacattgctaacccctgtggacaaagatttttcaacaagttgtcaggtttgtggataagattacgagaaccattgcaagtcctcgcttaatttgatattatatttgtgttttaactcttaattacttatccagtccattctctttatccacaaattgtggataagttgtggattgttttcacacagcttgtgtagattgttgtccacaacttgtggaatttgtcgaaaagctatttttctactatactatatgttttcaacatttcgtgtgtacgaatggtcagagccatatgctctttttttgtgttctataacaggggaagggcgctgatttttaaagaaaaggagggctgtgccggataatggagaatatattggatctttggaatcaagctctagctcaaattgagaaaaagctaagcaaaccgagtttcgaaacttggatgaagtcgacgaaagcccattcgctgcaaggagataccttaaccatcaccgctcccaatgaatttgccagagactggctggagtccaggtacttacatctcattgcagataccatatatgaattaaccggggaagaattgagcgtcaaatttgtcattcctcaaaatcaggacgaagaagactttttgccgaaaccgcaagtgaaaaaagcggcaaaagaggaaccgtctgattttccccaaagcatgctcaacccgaaatatacattcgacacattcgtcatcggatcgggaaaccgattcgcccatgcagcatcactggctgtggcggaagcacccgctaaagcgtacaaccctttatttatatacgggggagtcggtttaggaaaaacccacttaatgcacgcgatcggccattatgtcattgatcataatccttcagccaaagtggtgtacctgtcttctgaaaaattcacaaatgaattcatcaactcaatccgcgataataaagccgttgatttccgcaaccgctaccggaacgttgatgtacttttgatagatgatattcaatttttagccggaaaagaacaaacacaggaagagtttttccatacattcaacacacttcatgaagaaagcaaacaaatcgtgatttccagtgacagaccgccgaaagagatcccgacccttgaagaccgcctgcgttcgcggttcgaatggggattgattacagacatcacaccgccggatctggaaacgcggattgccattctgagaaagaaagcgaaggcggagggccttgatattccgaacgaggtcatgctttacatcgccaatcagattgacagcaacatccgcgaactggaaggggcattaatccgggttgtcgcctattcatccttaatcaataaagacattaacgcagacctggctgcagaagcattgaaagatattattccgtcttctaagccgaaggtcattacgataaaagagattcagcggattgtcggacagcagttcaacattaagcttgaagatttcaaagcgaaaaagcgtacgaaatcagtggctttcccaagacaaattgcgatgtatctttcaagagaaatgacggattcttctttgcctaaaatcggggaagaatttggcgggagagaccatacaaccgtcattcacgcccacgaaaagatttcaaaactgctgattgatgacgagcagcttcagcagcaggtgaaagaaataaaagaactgcttaaataatagtgtcctcggatgaatcggggaaagtgtgaataactttttcatagccatacacagtctgtccacatgtggataggctgtgtttcctgtctttttcacaacttatccacaaatccacaggccctactattactactgctatttttaaaaatatattaattatattatccgttaggaggataaacatgaaatttacgattcaaaaagatcggttagtcgaaagtgtacaagacgttctaaaagccgtttcatccagaaccacaattcccattctcaccggtattaagatcgtcgcctcagatgaaggagtatctttcacaggaagtgactctgatatttcaattgagtcattcattccgaaagaagatgatgataaagaaatcgtgacgatcgatcagccgggaagtatcgtgctgcaagcgcgtttcttcagcgaaatcgttaaaaaactgccgatggcgactgttgaaatcgaagttcaaaatcaatatttaacgattatccgttccggaaaagccgaatttaatttaaacggccttgatgcagatgaatatccgcatctaccgcaaatcgaagagcatcacgccattcagattccgacggatcttttgaaaaacctgatccgccaaaccgtgttcgctgtgtccgcctcagaaacacgccccatcttgacaggtgtaaactggaaagttgaaaacggtgaattattatgcactgccacggatagccaccgactcgctttaagaaaggcgaagcttgatattccggaagacagtacttataacgtggtcattcccgggaaaagcttaaccgagctaagcaaaattcttgatgacagccaagagctggtggatatcgtcattacagaaacccaagttctgttcaaagcgaaaaacgtattgttcttctcaagattgcttgacggaaactatccggacacgaccagcttaattccgcaggaaagcaaaacggaaatcgtcgtgaacacgaaggaatttttacaggcgatagaccgtgcttctttattggcgagagaaggccgcaacaacgttgtaaaactttctgccaaaccggcggattcgcttgagatttcatcaaattctccggaaatcgggaaagtggtcgaagctgtgctggcagacaagattgacggcgaggaattaaatatttcattcagtccaaaatatatgatggacgcactgaaagtacttgaaggagcggacatccgtatcagctttacgggagcgatgagaccgtttcttatccgtacgccgaatgatgagaccatcgttcagctcatccttccggtcagaacgtattaatcaaacagaatgtgctgccggcttagttcggcagcttttctattcatcagccgctccctcaagttttccctttccttatttcaggattttttagtacaattagatattagtgatatttgaaagaggtcgatattatggcaaatccgatttcgattgatacagaaatgattacgcttggccagtttttaaaattagctgatgtgattcagtccggcggcatggcgaagtggtttctgagcgagcatgaggtgactgtcaacaatgaacctgacaatcgccgcggcagaaagctttacgttggagacgtggtcgcgattgaaggatttggttcatttcaagtcgtcaattaaagcgggtgacagcggttgtatatccaaaatttagaattaacatcctaccgtaattatgagcgcgctgagcttcaattcgaaaacaaggtgaatgtgatcatcggggaaaatgcccagggcaaaaccaatctgatggaagccatctatgtcctttcgatggcaaaatcacaccgcacctcaaatgacaaagaacttatacggtgggacgaagactatgctaaaatagaaggaagagtgatgaagcgcaacggggacatcccgatgcagcttgtcatctccaaaaaaggtaaaaagggcaaggtcaatcatatagagcagcaaaaactcagtcagtatgtcggagcgctgaacaccattatgtttgcccctgaggatttaaatctcgtcaaaggaagccctcaggtgaggagaagatttctcgatatggagatcgggcaggtttctgccgtttatctgtatgatttatctctttatcaaaaaatcctttcacagcggaatcattttctgaaacagctgcaaagccggaaacagactgaccggaccatgcttgacgttctcactgatcagctgattgaagcagccgcaaaagttgtcgccagacgtctgcagtttacggcgcagcttgaaaaatgggcgcagccgatccattccggcatttcccggggacttgaagaactgacgcttaagtatcacacggcgcttgatgtatcagatcccaaagatttgtcgaaaataggtaacagctaccaggagtctttttcgaaattaaaagaaaaagaaatagaacgaggcgtcacattattcggaccgcatcgggatgatgtccttttttatgtgaacggacgcgatgtgcagacttacggttcgcagggacagcagcgtacgacggctttgtctctaaagctggctgaaatagatttgattcatgaagaaatcggagaataccccattttacttttggatgatgtactaagcgagctggatgattaccgacagtcccatttgcttcatacgatccaaggccgtgtgcagacatttgtcaccacgacgagcgtggatggcattgaccacgataccttacatcaagcaggaatgttccgtgtggaaaacggtgcgttagtgaagtgaagaaatgaggtgagcgattgtatattcatttaggtgacgactttgtcgtttcaacccgcgatatcgtcggcatttttgactgcaaggtcaatgtatcgccgatcgttgaagaatttctggacagacagaaagaaaaagtagtgccgtccgtaaacggcacgccaaagtctatcgtagtcacgactgagaatatatattactctcccttatcttccggcacactgaagaaacgtgcgcaatttatgttagaaatagattcttagcggatctttacaatgaatatattatcgtttaagaaaagtgtaggtgaatgtgcatggctatggaacagcagcaaaatagttatgatgagaatcagatacaggtattagaaggtttggaagctgttcgaaagagaccggggatgtacatcggatcaactaacagcaaaggccttcaccatttggtgtgggaaatcgtcgacaacagtattgacgaagccctggccggttattgtacagatattaacatcgagattgaaaaagataacagcattaccgttaaggacaacgggcgcggaattccggtcggtatccaggagaagatgggccgccctgcggttgaagtcatcatgaccgttctccacgccggcggtaaatttgacggaagcggatataaagtatccggcggtcttcacggtgtaggggcatccgtcgtaaacgccttgtcgaccactcttgacgttacggttcatcgtgacggaaaaatccattatcaggcgtacgagcgcggtgtacctgtggccgatcttgaagtgatcggcgaaactgataagaccggaacgattacgcacttcgttccggacccggaaattttcaaagaaacaactgtatatgactatgatctgctttcaaaccgtgtccgggaattggccttcctgacaaaaggcgtaaacatcacgattgaagacaaacgtgaaggacaagaacggaaaaacgagtaccactacgaaggcggaatcaaaagctatgttgagtacttaaaccgttccaaagaagtcgttcatgaagagccgatttatatcgaaggcgagaaagacggcataacggttgaagttgcattgcaatacaacgacagctatacaagcaatatttattctttcacaaataatatcaacacatacgaaggcggcacgcacgaggccggatttaaaaccggtctgacccgtgtcataaacgactatgcaagaagaaaagggattttcaaagaaaatgatccgaatttaagcggggatgatgtgagagaagggctgactgccattatttcaattaagcaccctgatccgcaattcgaagggcagacgaaaaccaagctcggcaactccgaagcgagaacgatcactgatacgctgttttcttctgcgctggaaacattccttcttgaaaatccggactcagcccgcaaaatcgttgaaaaaggtttaatggccgcaagagcgcggatggcggcgaaaaaagcccgggaattgacccggcgcaaaagtgcgcttgagatttccaatctgccgggcaaactggcggactgttcttctaaagatccgagcatttccgagctgtatatcgtagagggtgactctgcgggcggatcagcgaaacagggacgggaccgtcatttccaagccattctgccgctgcgcggtaagattctgaacgttgagaaagccagacttgataagattctctcaaacaatgaggtcagatcaatgatcacggccctcggaacaggaatcggagaagattttaatcttgaaaaagcgcgttatcataaagtggtcatcatgacggatgccgatgttgacggcgcccatatcagaacgcttttattaacgttcttctacagatacatgcgggaaatcatcgaaaacggctatgtctacattgcccagccgccgctttataaagtgcagcagggaaaacgggtggaatacgcttataacgataagcagcttgatgagctgttaaaagagcttccgcaatcacctaagcccggcctccagcgttataaaggtcttggagaaatgaacgcgactcagctttgggaaacgacaatggaccctgcgaccagaacgcttctgcaagtcaatcttgaagatgcaatggacgctgacgagacttttgaaatgctgatgggtgacaaagtagaaccgcggagaaacttcatagaagcaaacgccagatacgtgaaaaatcttgatatttaaccaagaaagccttattttcgttaagaaataaggcttttttctcaaagcggcttctaaagcctctgaaaacccgcaaaacccgtatattctactaaattaatgtgtataaacacaagtttattgatataatggagaatagtgaaatcgtattgaagatcataatggacaatctactcccacattatttcatgtgatacttcagggaggtttttttaatgagtgaacaaaacacaccacaagtacgtgaagtcaatatcagtcaggaaatgcggacatccttcctggactatgcaatgagcgttatcgtatcccgggcgcttccggatgtgcgtgacggtctgaagccggttcacagacggattttgtacgcaatgaatgatttaggcatgaccagtgacaaaccatataaaaaatctgcccgtatcgtcggtgaagttatcggtaagtaccacccgcacggtgactcagcggtttacgaatcaatggtcagaatggcgcaggattttaactaccgctacatgcttgttgacggacacggcaacttcggttcggttgacggcgactcagcggccgcgatgcgttacacagaagcgagaatgtcaaaaatcgcaatggaaattctgcgtgacattacgaaagacacgattgactatcaagataactatgacggttcagaaagagagcctgccgtcatgccttcgagatttccgaatctgctcgtaaacggggctgccggtattgcggtcggaatggcgacaaacattcccccgcatcagcttggggaagtcattgaaggcgtgcttgccgtaagtgagaatcctgagattacaaaccaggagctgatggaatacatcccgggcccggattttccgactgcaggtcagattttgggccggagcggcatccgcaaggcatatgaatccggacggggatcaatcacgatccgggctaaggctgaaatcgaagagacttcatcgggaaaagaaagaattattgtcacggaacttccttatcaggtgaacaaagcgagattaattgaaaaaatcgcggatcttgtccgagacaaaaaaatcgaaggaattaccgatctgcgagacgaatccgaccgtaacggaatgagaatcgtcattgagatccgccgtgacgccaatgctcacgtcattttgaataacctgtacaaacaaacggccctgcagacgtctttcggaatcaatctgctggcgctcgttgacggacagccgaaggtactaagcctgaaacaatgtctggagcattatcttgatcaccaaaaggttgtgatccggcgcagaacggcttacgaactccgcaaagcggaagcaagagctcacattctggaaggtttaagaattgctctcgatcatttagatgccgttatttctcttatccgcaattcccagacggctgaaattgcgagaacgggtttgatcgaacaattctcactgactgaaaaacaagcgcaagctattctggatatgcgccttcagcgattaaccggtctggagcgcgaaaagattgaagaggaatatcaatcacttgttgcgcttatcgctgagctgaaagatattttagccaatgaagaaagagttcttgagatcatccgtgaagaacttaatgaaatcaaagagcgtttcaatgatgagagacgcactgaaatcgtgacgtccggtcttgaaacaattgaagatgaagatcttatcgagagagaaaatatcgtcatcacactgacccataacggctatgttaaacgtctcccggcgtccacataccgcagccaaaaacggggcggaaaaggcgtacagggaatgggaacgaatgaagatgactttgtggaacacttaatttccacatcaacgcacgatacgattctgttcttctctaataaagggaaggtataccgttctaaaggatatgaaatccctgaatacggccgtacggcaaaaggcattccgattattaaccttctggaagttgaaaaaggcgaatggattaatgccattattccggtcagcacgtttgatgaggagcaatacctcttctttacgaccaaacaaggggtgtcgaaacgtacggcactgtcccagtttgcgaatatacggaataacggtctgatcgccctaggtctccgggaagacgatgaactgatggccgtccgcctgactgacggcaagaaacaaatcatcatcggaacgaagaacggtttgctgatccgtttccctgaagaagatgtaagacaaatgggacgcacagctgcgggtgttaaaggtatcacgctgacagacgatgatgtcgttgtaggcatggagattcttgaagaagactcccatgtcctcatagtgacagaaaacggctacggcaaacgcacaccggcttcagaatacagagttcaaagccggggcggaaaaggccttaaaacatgtaaaatcactgacagcaacggtccgttagtaactgtgaaagcaacaaaaggcgaagaggacttaatgattattacggcaagcggcgtgttaatcagaatggatattaatgatatctccactacgggacgcgtaacacaaggcgtccgtctgatccgcatgtctgatcaagagcatgtagccactgtggcgcttgtcgaaaagaatgaagaagagccggaagaaacggaagaagtataaacgaaaaagcgcagctgcaacaggctgcgcttttactatataaagaaataaaaaaaagctttgacacatggtgatgatgctgatataattctttttgttgtctttttaatagaaaggcaagcctagcgaaaatattttttaaaaaagtattgacctagcaaactgaaaatgttatgattaagaggtcgcttcgagaggggcggaaaagttctttgaaaactaaacaagacaaaacgtacctgttaattcaaagttttaaataaatcgcacagcgatgtgcgtagtcagtcaaactactttatcggagagtttgatcctggctcaggacgaacgctggcggcgtgcctaatacatgcaagtcgagcggacagatgggagcttgctccctgatgttagcggcggacgggtgagtaacacgtgggtaacctgcctgtaagactgggataactccgggaaaccggggctaataccggatggttgtttgaaccgcatggttcagacataaaaggtggcttcggctaccacttacagatggacccgcggcgcattagctagttggtgaggtaacggctcaccaaggcgacgatgcgtagccgacctgagagggtgatcggccacactgggactgagacacggcccagactcctacgggaggcagcagtagggaatcttccgcaatggacgaaagtctgacggagcaacgccgcgtgagtgatgaaggttttcggatcgtaaagctctgttgttagggaagaacaagtgccgttcaaatagggcggcaccttgacggtacctaaccagaaagccacggctaactacgtgccagcagccgcggtaatacgtaggtggcaagcgttgtccggaattattgggcgtaaagggctcgcaggcggtttcttaagtctgatgtgaaagcccccggctcaaccggggagggtcattggaaactggggaacttgagtgcagaagaggagagtggaattccacgtgtagcggtgaaatgcgtagagatgtggaggaacaccagtggcgaaggcgactctctggtctgtaactgacgctgaggagcgaaagcgtggggagcgaacaggattagataccctggtagtccacgccgtaaacgatgagtgctaagtgttagggggtttccgccccttagtgctgcagctaacgcattaagcactccgcctggggagtacggtcgcaagactgaaactcaaaggaattgacgggggcccgcacaagcggtggagcatgtggtttaattcgaagcaacgcgaagaaccttaccaggtcttgacatcctctgacaatcctagagataggacgtcccttcgggggcagagtgacaggtggtgcatggttgtcgtcagctcgtgtcgtgagatgttgggttaagtcccgcaacgagcgcaacccttgatcttagttgccagcattcagttgggcactctaaggtgactgccggtgacaaaccggaggaaggtggggatgacgtcaaatcatcatgccccttatgacctgggctacacacgtgctacaatggacagaacaaagggcagcgaaaccgcgaggttaagccaatcccacaaatctgttctcagttcggatcgcagtctgcaactcgactgcgtgaagctggaatcgctagtaatcgcggatcagcatgccgcggtgaatacgttcccgggccttgtacacaccgcccgtcacaccacgagagtttgtaacacccgaagtcggtgaggtaacctttatggagccagccgccgaaggtgggacagatgattggggtgaagtcgtaacaaggtagccgtatcggaaggtgcggctggatcacctcctttctaaggattttaacggaatataagaccttgggtcttataaacagaacgttccctgtcttgtttagttttgaaggaactttgattctttcatatggtagatgggcctgtagctcagctggttagagcgcacgcctgataagcgtgaggtcggtggttcgagtccactcaggcccaccatctttacccaatacggggccttagctcagctgggagagcgcctgctttgcacgcaggaggtcagcggttcgatcccgctaggctccaccaacgtgttctttgaaaactagataacagaagtaattcacattcaattagtaatgcaagatatcacgtagtgattctttttaacggttaagttagaaagggcgcacggtggatgccttggcactaggagccgatgaaggacgggacgaacaccgatatgcttcggggagctgtaagcaagctttgatccggagatttccgaatggggaaacccaccactcgtaatggagtggtatccatatctgaatacataggatatgagaaggcagacccggggaactgaaacatctaagtacccggaggaagagaaagcaaatgcgattccctgagtagcggcgagcgaaacgggaccagcccaaaccaagaggcttgcctcttggggttgtaggacactctgtacggagttacaaaggaacgaggtagatgaagaggtctggaaaggcccgccataggaggtaacagccctgtagtcaaaacttcgttctctcctgagtggatcctgagtacggcggaacacgtgaaattccgtcggaatccgggaggaccatctcccaaggctaaatactccctagtgaccgatagtgaaccagtaccgtgagggaaaggtgaaaagcaccccggaaggggagtgaaagagatcctgaaaccgtgtgcctacaagtagtcagagcccgttaacgggtgatggcgtgccttttgtagaatgaaccggcgagttacgatcccgtgcaaggttaagcagaagatgcggagccgcagcgaaagcgagtctgaatagggcgaattgagtacgtggtcgtagacccgaaaccaggtgatctacccatgtccagggtgaagttcaggtaacactgaatggaggcccgaacccacgcacgttgaaaagtgcggggatgaggtgtgggtaggggtgaaatgccaatcgaacctggagatagctggttctctccgaaatagctttagggctagcctcaaggtaagagtctcggaggtagagcactgattggactaggggcccctaccgggttaccgaattcagtcaaactccgaatgccgatgacttatccttgggagtcagactgcgagtgataagatccgtagtcgaaagggaaacagcccagaccgccagctaaggtcccaaagtatacgttaagtggaaaaggatgtggagttgcttagacaaccaggatgttggcttagaagcagccaccatttaaagagtgcgtaatagctcactggtcgagtgactctgcgccgaaaatgtaccggggctaaacgtatcaccgaagctgcggactgttcttcgaacagtggtaggagagcgttctaagggctgtgaagcaagaccggaaggacttgtggagcgcttagaagtgagaatgccggtatgagtagcgaaagaggggtgagaatcccctccaccgaatgcctaaggtttcctgaggaaggctcgtccgctcagggttagtcgggacctaagccgaggccgaaaggcgtaggcgatggataacaggttgatattcctgtaccacctcctcaccatttgagcaatggggggacgcaggaggatagggtaagcgcggtattggatatccgcgtccaagcagttaggctgggaaataggcaaatccgtttcccgtgaaggctgagctgtgatggcgagcgaattatagtagcgaagttcctgattccacactgccaagaaaagcctctagcgaggtgagaggtgcccgtaccgcaaaccgacacaggtaggcgaggagagaatcctaaggtgatcgagagaactctcgttaaggaactcggcaaaatgaccccgtaacttcgggagaaggggtgctctgttagggtgcaagcccgagagagccgcagtgaataggcccaggcgactgtttagcaaaaacacaggtctctgcgaagccgtaaggcgaagtataggggctgacgcctgcccggtgctggaaggttaagaggagcgcttagcgtaagcgaaggtgcgaattgaagccccagtaaacggcggccgtaactataacggtcctaaggtagcgaaattccttgtcgggtaagttccgacccgcacgaaaggcgcaacgatctgggcactgtctcaacgagagactcggtgaaattatagtacctgtgaagatgcaggttacccgcgacaggacggaaagaccccgtggagctttactgcagcctgatattgaatgttggtacagcttgtacaggataggtaggagccttggaaaccggagcgccagcttcggtggaggcatcggtgggatactaccctggctgtattgaccttctaacccgccgcccttatcgggcggggagacagtgtcaggtgggcagtttgactggggcggtcgcctcctaaaaggtaacggaggcgcccaaaggttccctcagaatggttggaaatcattcgcagagtgtaaaggcacaagggagcttgactgcgagacctacaagtcgagcagggacgaaagtcgggcttagtgatccggtggttccgcatggaagggccatcgctcaacggataaaagctaccccggggataacaggcttatctcccccaagagtccacatcgacggggaggtttggcacctcgatgtcggctcatcgcatcctggggctgtagtcggtcccaagggttgggctgttcgcccattaaagcggtacgcgagctgggttcagaacgtcgtgagacagttcggtccctatccgtcgcgggcgcaggaaatttgagaggagctgtccttagtacgagaggaccgggatggacgcaccgctggtgtaccagttgttctgccaagggcatcgctgggtagctatgtgcggacgggataagtgctgaaagcatctaagcatgaagcccccctcaagatgagatttcccattccgcaaggaagtaagatccctgaaagatgatcaggttgataggtctgaggtggaagtgtggcgacacatggagctgacagatactaatcgatcgaggacttaaccaatttgaatgtatacttattgttatctagttttgagagaacactctcaatggtttggtggcgatagcgaagaggtcacacccgttcccatgccgaacacggaagttaagctcttcagcgccgatggtagtcgggggtttccccctgtgagagtaggacgccgccaagctatcattacggtaaaggcagctcatcatgagctgccttttttgtttacaagtattgcttcaggaatttagaaacgtaatacggaaatttgcgttccgtgacctctaagaaccgtcggatcatcacataatcatcactgacatgctgtgtcagcagttcataccaccactccgtttcatatctcgcaatcatcccaatattgtagagaaccaaataatgaataatcatttccggaagatgcaggaagtgatcacgctgagagggaatgtaatattgatttttctccaagtgaaacaataaatttggagaagaccaaggttccctgtctatcgggtcagcctcaaaaaacaagtggttatggtctttcctcagaaaagaccacttcaaatgatggctgatatattcagcaaagcgggaatcagacatattgtaatgaatcaccgcatgctcaggcactgaaataaggtcatcgttcagctctacttgggtcatccaattctttttctcttggaagtaaaagacagtatgcaattcaggtatggctgtcagtaatttcttcattgtgtaccgttcttcctcaagaccagctatcccgaataagtgcttcattacatgaatacataagccattgcgctgcaccttcacttcatcatccctaaaggagtaattttgctttttgcgtttccgggcagtcacgccatgcgcgagtactgaagcgtggcttgggtagcttggatctgtggtcagaaggcaggctttcagcaattgtgacatcccgtaaaacaacagaataggcttaatttctaaaggagaaagagatgcctgcttataaaaggactcggcgtgtttgataaagaatatgaagcgctcactgttcttaaacgcatatcgttttggttcttccatgccgctttctgtatagactttgtttagaaatttctgggaagattctacggaataaaataatgataactctttccactcatgatctctcatatgtatttttaaaccctttcctttatctaaatatttcaactctttttcgcttccttgacatgctgttttctagttgataatctacatataatattttgccgaaaagagggggatttactaatgtgggaaagtaaattttcaaaagaaggcttaacgttcgatgatgtactgctcgtaccggctcaatcagacgtacttccgcgtgatgtggatttatctgttgaactgacaaaaacgttaaagcttaatattcctgtcatcagtgcgggaatggatacagtaacagaatcagcaatggcgattgcgatggccagacagggcggcttgggcattatccataaaaacatgtccatcgaacagcaggctgaacatgttgacaaagtcaaacgttctgaacggggcgttattacaaatcccttctttttaacacctgatcatcaagtattcgatgcggagcatttgatggggaaatacagaatttccggtgttccgatcgtagataataaagacgatcaaaagcttgtcggtatcattacaaaccgtgatcttcgctttatctctgattattcaatgaaaatcagtgatgtcatgacaaaagaagagctggttacggctcctgtgggaaccacattagacgaagcagaaaaaatcttacagaaacataaaattgaaaaacttccgttagtggatgaccaaaacaaattaaaaggtcttatcacgatcaaagatattgaaaaggttatcgaattccctaattcatctaaagatgaacacggacgccttattgtcggcgctgcggtaggcgtgacaggcgatacaatgacacgcgtcagcaagcttgttgaagcgaatgtcgacgttatcgtggttgatacggctcacggacattccagaggcgtactgaacacagttgcgaaaatccgtgaaacatatcctgaactgaacattatcgcaggaaatgttgcaacggctgaagcgacaaaagctctgattgaagccggagcaaatattgtcaaagtgggaatcgggcctggttctatctgtacgacacgcgtcgttgcaggtgtaggcgtaccgcagatcactgccatttatgattgtgccactgaagcgagaaaacacggcgcgacaattatcgcagacggcggtattaaattctccggagatattacgaaagcgttggcttcaggcggacatgccgtaatgctcggaagcctgcttgccggtacttcagaaagcccgggagagactgaaatctatcagggcagaagatttaaagtgtatcgcggtatgggttctgttgctgccatggaaaaaggcagtaaagaccgatatttccaagaagaaaataagaaattcgtccctgaaggtatcgaaggacggactccgtacaaaggtcctgtagaagaaacagtgtatcagcttgtcggcggtcttcgttcaggtatgggatattgcggttcaaaagacttgcgcgctttaagagaagaggctcaattcatccgtatgacaggtgccggtcttcgcgaaagtcatccgcatgatgtccaaattacgaaagaatcaccaaactacacaatctcataattgttacaaataaaaaacatttgacagggtcgctgactctgtctattttttttatatcgagtgtgataaaatttatactgttgtgttttgaatttgaatatgtccttaacggcttaattatagatttaaaatgaatgacggaggtcgtaagattgaacatcacgaaatggaaacagctgttggtgtcattagtggtactggcactggccgcaacttgctttgttccgatgtctaaagcggaggcagccggcaatgacccgattgatgtcaacgcatcagctgcgataatgattgaggcttcatcgggaaaaattttatacagtaaaaatgcagacaaaagactgccgattgccagcatgacaaaaatgatgactgaatatctgcttctggaagccattaaagaaggaaaagtgaaatgggatcaaacgtatactcctgatgattatgtctatgaaatttctcaagacaacagtttatcaaacgtcccccttcgaaaagacggcaaatacacggttaaagaactgtatcaggccatggcgatttactctgctaacggagccgcgattgcagttgccgaaattcttgccggaactgaaacgaaatttgtcgctgaaatgaatgcgaaagccaaagaattaggcatgacaaactatgattttaaaaatgccacagggcttgtgaatgaagatcttcacggcaaacagccgcaaggagaaggcgttaaagaagagagtgaagtttctgctaaagacatggcgcttcttgcagaccgcctgatcactgattatccggaagttctcaaaacaacaagcatcgctaaaacgaaattcagagccggcactgatgatgaaatggacatgccgaactggaacttcatgttaaaaggtcttgtttctgaataccctggcgttgacggcttaaaaacgggttctactgattctgcgggatcttgttttacaagcacagcacagcggaacggaatgcgggtcatcaccgttgtattaaacgcaaaaggcaacctgcataccggacgttttgatgaaacgaaaaaaatgctcgattacgcatttaacagcaatttctcaatgaaagatctttaccctgaaggctctcaagtaaaagggcacaaaacggttgacgttgaaaaagggaaagacaagcaagtcgatattgttactgacaaggcgctttctattcctgtgaaaagcggggatgaaaagaactataaagccgaagggactatagataaaaaagaaatcacggctcctgtgaaaaagggaacgaaagtcggaacgctgacagttacatacaaaggcagtgacaaagactatggcttcctcaaatccaaagagttcagcgtgaatcttgtaacgaaaaatgatgtagataaagcaaactggtttgttcagatgatgcgcggcatcggcggatttttctccggtatctggaacagcgccgttgacacggtaacaggctggttttaagaaataagaaagagctctgatgaaagttagggctcttttgcttaatatactgaaaaaaccaaattattagtaaaaaaatgatatctatcttattcatctcgctgtaaaataagaatacccatatgaaatattgtatttctgggatacaataagagatagacattatctaactatacattgactagggggaccaaataatggctcaaacaggtactgatcgtgtaaaacgcggcatggcggaaatgcaaaaaggcggcgtcatcatggacgtagtaaatgctgaacaagcgaagattgcggaagaggcgggagctgttgccgtaatggcgttagaacgcgttccggctgatattcgcgctgccggcggtgttgcccgcatggctgatccgacaatcgttgaagaagtaatgaatgctgtatccattcccgtaatggcaaaagcgcgtatcggacatatcgttgaagcgcgtgtccttgaagcaatgggagtagattacatcgatgaaagtgaagttctgactccggctgacgaagaatttcatttaaataaaaatgaatatacagtcccgttcgtatgcggctgccgtgatctcggcgaagcaacgcgccgtatcgccgaaggagcttccatgcttcgtacaaaaggcgaaccgggaacaggaaacattgtggaagctgtccgccatatgagaaaagtaaacgcgcaagtgcgcaaagttgttgcgatgagcgatgatgagctgatgactgaagctaaaaacctcggcgctccttatgaactgcttcttcagatcaaacgtgacggcaaactgcctgtagtgaactttgctgccggcggagtagcgacgcctgctgacgcggcattgatgatgcagcttggcgctgacggcgtatttgtcggttcaggtattttcaaatcagacaaccctgctaaattcgccaaagcaattgttgaagcaacgactcattatacagactacaaactgatcgctgagctttctaaagaattaggcacagcaatgaaaggcatcgaaatctcaaatctattgccggaacagcgtatgcaagaacgcggctggtaaaaccataggagagctgtaagcatgttaacaattggtgtacttggacttcaaggagcagtaagagaacatattcgttcaattgaagcatgtggttcaaaaggtgtcgtcattaagcgtcctgaacagctgaatgacatcgacggcttaatcctgccgggcggggaaagcacgacgatgcggcgtttaatggatacgtatcattttatggagccgcttcgcgagtttgccgctcaaggcaagccgatgttcggcacatgcgccggtctgattatcttagccaaagagatagcgggaacggataacgctcatttagggctgttgaacgtagttgtcgagcgtaattcctttggccgtcaggtcgacagctttgaagctgatctgacgattaaaggccttgatgagccgtttacgggtgtatttattcgcgcaccgcatattttaaaagccggagaagatgttgaagtgctttgtgagcataacggacgcatcgtggctgcaaagcagggaaatttcctcggctgctcgttccatcctgaactgacggatgatcaccgggtgacagagctgtttgtgaagatggcggaaaagcataagcaggaaacagctgtataaaacagttgaaaaccgctgatacttatagtacattataatcacaaataaagatcgaaaagcgttgacaggaagcagtaggaagcccctctttcaaagagagccgatgggtggtgcgaatcggtgaaagatgctgtccgaatccgtccttgagcgaaatgctgaaaacaagtaggcatttacgggaaaaccgttatgtgttaaagcggaaagcaagtgtgagcttgttttcaatcagggtggcaacgcgagagctctcgtcccttttaggggatgagggctcttttttattttcgataaaaacagataggagttgttaggcatgattgatacgaaggtgctgagagccaattttcaagaggtaaaagcgaagctcattccaaaaggcgaagacttatctgactttgacaagtttgaagagctggatgaaaagagaagagagcttatcggtaaagtagaagaactgaagggaaaacgcaatgaggtgtctcagcaggtcgccgttttgaaacgggagaaaaaagacgctgatcatattattaaagagatgcgtgaagtaggcgaagaaattaagaagcttgatgaagagcttcgtactgtcgaaacgacgctcgaaaccatccttctgtctattccgaacatcccgcacgattcagttcccgtcggagaaacggaagatgataacattgaaattcgcaagtggggagaggcgccggcattttcatatgagccgaaaccgcattgggatatcgcagaccgcttaaacattcttgatttcgaacgcgcttcaaaagtaacaggcagccggtttgtgttttataaaggattaggcgcccgcctcgaacgcgcgctctacaactttatgctggatcttcacgtggatgaatatgattacacggaagtcattcctccttatatggtaaaccgtacgagcatgacaggtacgggacagcttcctaaatttgaagaggatgcttttaaaatcagagaagaggattatttcttaattccgacggcggaagtgccgattacaaatatgcaccgcgatgaaatcttatccggtgagaacctgccgatcaattatgccgcgttcagcgcctgcttccgttcagaagcgggatccgccggccgtgatacacgcggtttgatccgtcagcatcagttcaacaaggttgagcttgtaaagttcgtgaagccggaagattcttatgaggagcttgaaaaactgacaaatcaagctgagcgggtgcttcagctgcttgaactgccgtatcgcgtcatgagcatgtgtaccggtgatctcggctttacagctgcgaaaaagtacgatattgaggtatggattccaagccaagacacataccgtgaaatttcttcttgcagcaactttgaggccttccaggcaagacgtgcgaacattcgtttcagacgcgaagcgaaaggcaagcctgagcatgtgcatacattaaacggttcaggtcttgcagtcggcagaactgtagctgccatcttggaaaactaccagcaggaagacggaagtgtcatcattcctaaagtgcttcgtccttatatgggaaataaagaagtcatcaaaccataaaaaggtgcgccctagaggcgcgccttttttgctgcccggtatagagcggcggcattccgggctgtactttccaggttaaaacggccggatgctaaggcgtcttcaagacttacagcgccgggcacgatagaaaatacagctgttattcctgcgctgtaaacatgctcaaaatttttgcctaaggagcccgccaatgcgataacgggaatttcttgagcggctgcgcgtgcggcgatcccggcgggggttttgccgaatatcgtttgtccgtcaatctggccctctccggtaatgacaaggtcagcatctcttatctgatctgagaaggacagtgtatctaatacaacgtcaatcccgctttgaatttctgcctgtaagaaagcgatcagtccagcgcccagcccccctgcggcgcccgcgccttttacggtatccgcttcgatatcgtgctgacgtctcaatacgtcagcgaaatggtataaattgcgatccaatacaactttagtcttctcggacgcccctttttgcgggccgaagacatatgacgcgccgttttcaccggtcaggggattttcgacatcacatgcggcacgaaaacggatatgtttcagatcaggggagagcccgcttatatcaatagaagctagggtgtgcagagcgcctcctccgtcatgtatctcctgaccttcctcatttaagaaacgcacaccgagcgcgctcgccattcctgttccgccgtcattggttgcactcccgccaagcccgatgatgatctcactcgccccgcgggaggctgcatccgctatcagttcacccgttcctcttgtcgttgtgttcaacggatctctgagatggcggggaacgagatggagtcccgatgcttccgccatttcaatgactgccgtgcgtccgtctcccagaagtccatatgcggcgtttaccggcgttcccagcggaccggtcacagtttttttgatgatgcttccgccagtggcatccgtcaaagcctgaacggttccttctccgccgtcggccgcgggtatcttggtatattccgcgtcagggaagaccgctttgaatcctttttctatgctgtcagcggcttcttttgatgtcatgctttctttgaaagaatcgggtgcgatgatgattttcattatgttctccacctttatgagcaggttatctgtttgaatctattcttgatttttactttgttttcctgcccgtatggcatactgaggttgaattggacgcaagacttttgtatgatagtaaagctgacggaaaagctgtttaagaaatgaaataaaaaatatgaaaaagcgcttgactgaaatttgggtcatgtggtatattattaaatgtcgatacggaggaatacccaagtctggctgaagggatcggtcttgaaaaccgacaggggtgtcaaagcccgcgggggttcgaatccctcttcctccgccatattgattttaaacctaatgaaactcgagcatatattggagattgttttgtccgctgcatctgatgcagcggattttttatatgcaaaaaaagcgattttctctgttcggggaaaatcgctttgctatttttatttgtttctgttttcgctgatcacgtgactgattttttcgatcaaaggttccagtgactgttcatcagcttcaaggtcataatcttcaatgcgtactttcagtacagggcaggcgttaaaaccgctgatccagtcttcgtaccgtgtatacatctcttcccaataagagcggtttgtctgcagctccatctcgcggccccgcttttcaatccggcttataatgtattcaaggtcgccttctaagtagatcaaaacatcaggatgcgggaaatacggcgtcatgaccatcgcctcaaataggcttgtgtatgttgtgtaatctgtcagcgacatggttcctttatcggcatgcatttttgcgaatatgcctgtatcttcataaatcgaacggtcctgcacgaatccgccgcctgattcaaacatgtttttttgctctttgaaccgctcagccagaaaataaatttgcaaatggaagctccagcgttcaaaatcgtgataaaacttctctaaataagggttttcatccacttcctcaagtgaggtatgaaacccgagccgttttgctaaagctttggtcaaagtcgattttccgactcctaccgttcccgctactgttataatggcgttgtttggaatatgaatgtctttcatttaataagctcctttacctgacgggcaattctttcatagtctgtcttattcaaaacaaagtcttcagtatcaccgtcaatggtcagtacagatatatccggatcttcttcctgaagctgtctgatggctgtgtcgtaatctgcaatgagatgttccagatattgatgttcgatatttttctcaaacgggcgcccgcgtttttcaatgcgttgaagcaatgtcggcaggcttgcctttatgtatacaatgatattcggcttcggcaggtcgtgagtgagcagatgatagatctgcttatacttctcaagcttttggccgtgcaatgtacgctctgcgaaaataacatttttataaatatgataatcggacaaaacgggctgtccttgttttaaataatctcgatcggtgtcttcaagctgtttatacctgtgacatagaaaaaacatttcaagctggaaactccactcctcgatattgtcataaaacttatcgagataagggttgtcttccacaatctcattaatcataggaaaaccgagctcttcagaaagcatcgtagcgagtgtcgtttttcctgccccgataggaccttctaccgcgataaaaggggctctgttcattgaaaatcctccttaattctgcaaacatccgtcagctgccggcctttatattgtatcacactcacagaaaagcccatgaaaaaagacgctcccaattaacgaaacgtctcttttacaatatgaaattgatcgccgagcaaaagccagttttgcgggaaagaaaggccgagtttccaatagctgattcctcttaaatgaagttctttaattaaattgaatttcgcttgaatggatcgtgcgtcttcaaaccatacttcatgccgtctctgatttgcatccgtgtatcggaagaagggagcctgggcggtttcgtcatattgaatgtcgactttatagcgtgctgccagagcgattgcctgctgaggactgacggctttcgctgtcgttccctgtttgaaaggcagtgtccaatcatagccgtacatattctggcccatgacgatttttgaagaaggcatttccgtcagcgcgtactcaatgacatttcttacagggccgataggtgatacggcctcagccgggcctccgctgtacccccactcatatgtcataatcacgacgaaatcgacgatttctccatgtgccctatagtcatgagcttcgtaccatttgccggcctgagtcgcgctcgttttcggagcaagcgccgttgaaatcttccagccttcccgatgaaaaatcgttctcgcttcacgtaaaaaacgattgtaggcttccctgtcctgtggacgtaaatattcgaaatcaaagtgaatatcgcgaaagccgtactttttagccgtggagacgatttcctgaaagagttttgttttcactgtattgtcgttcaagatgagccgcccgagttcatcgctgaatgcgtcattttcaaggttggtgatgatcatcatcagtgtggtgttgtgcctgtcactgatgctttttaaattggtcagaggcggttcctttaaagtcccgttccgctgcacttgaaaactgaatgcgccgaggtatgttaaataaggagaggcctcccttgccgcctgctgaagattagcgcttacgctcgttccccgcggttctatatatgcgtttgattcgatatcgggcttattcgcctgctgcggaatgtaaaggcgggttccgactctcaatgtggtgccgggctgaattccgttcaccctcgcaagctccgcggccgatatatgaaaacggccggcgattgacgcgagagtatcaccttgttttacttcgtaatattgaccctcaatcgggatgacaagggtttgtccgacaaccaatgtattgggattaggcagtttatttgcttccgcaatgacatttgcggctgtccggtagcgcgccgcaatagcggaaagcgtgtcgccccgtttcactatatagatctgaatgaaaaacgcctcctttcatatccgctatcaaatatatgaaaaaaggaggctgatcatgtttatttttcgccggtaatttgtttttccgtggttatttctgcgaagagaacattctccatcatggtcaaagcgaaatcattgtcttcgtcgttattggaagcggtgcagtctttcggaatggcaatgctgtattctctcatataagcgtcgttggccgtgaacagcacacaaatgttcccggcaatccccgtgatgattaatcggttcacttgtaattcggtcagaagggtgtgaagcgccgtttcgtaaaaagcggaatgcttcggtttaatgagaaaataatcatccggctgaggcgaaatatcttttataatggaggcgcttctgtcgttgctgcattcctccctgatggcatcaatatcagccttccagagcccgtaatgatcattaatataaataatcggccagttgctttgttttgcatgcttctttaatgataaaatacgggggacaatttgtttggttttttcagcaagacgttcgcccatatcaaattgaaaattgttgatcatatcgacaatcagaagggctgtgttgttaggttcagacaataccggcaactcctttctgctggggtattcctattttaacctttatgagacatgaaaaaacttaagaagagagctcgaaccgatgaatgatgaatattatatgagagaagccataaaagaagcgaagaaagccgaagagaaaggtgaagtgccgatcggagcagttcttgttctgcacgatgagatcgtggcgcgggcgcataatctgcgggagactgaacagaggtcgcttgcccacgccgaaatgctggcgatagacgaagcgtgccgtaagctggggacatggagacttgaggatgccgttctctatgtcactttggagccgtgtccgatgtgcgcgggagccgtcgtgctttcgagagtcgataaggtcgtattcggcgcatttgatcccaagggggctgtacaggaacgctgatgaacctcttgcaggaagagcggttcaaccaccaagcggaagtggtgagcggcgtgctcggagaagagtgcggagaaatgctcagcgcttttttcagaaagctgcgccggcaaaagaaagacatgaggaaaaagttgtctgagtagtacggttgcattttctgcctgaagcagatatacttatgtgtgcatcatgaatggtgcgcatatcaaaatttgatatttattttgccgtgctaagcggggaggtagcggtgccctgtacccgcaatccgctctagcggggccgaatcccttctcgaggttcgtttactgtaaggtctgccttaagtaagtggcgttgacgtctgggtcctgcgcaatgggaattcatgaaccatgtcaggtccggaaggaagcagcattaagtgaaacctctcatgtgccgcagggttgcctgggctgagctaactgcttaagtaacgcttagggtagcgaatcgacagaaggtgcacggtaaatcaatcatcaaatttcagactcacctgttatggcaggtgagttttttcgtatatgaaaaacgggttttggcgttaaaagcacgttcatgtataataaacatgatgaataacagaggagggcgcatcctgtgggttaccaagctttatatcgagtatttaggcctcagcagtttgaagatgtggtcggacaggaacacattacgaaaacgctgcaaaatgcccttttgcaaaagaaattttctcatgcatatctgttttctggaccgcggggaacgggaaaaaccagtgcagctaaaatatttgcgaaagcagtcaactgtgagcacgcccctgtagaagaaccgtgcaatgagtgcgcggcatgcaaggggatcacaaatggctctatatcagatgtgattgaaatagatgcggcgtcgaataacggcgtagacgaaatccgcgacatccgtgacaaagtaaaatttgccccgtcggccgttacttacaaggtatatattatagatgaggtgcatatgctctctatcggcgcattcaatgcgcttctgaaaacgctggaagaaccgccggcacattgcattttcatattagctacgactgagcctcataagattcctttaaccattatctccagatgtcagcgttttgacttcaaacggattacatccaaagcaattgtcggacgaatgaagacaatcgtcgatgcagagcagctgaaggtggaagaaggagcccttgatatcatagcgagtgctgcggacggaggaatgagggacgcgctgagcctgctcgatcaagctgtatcattcagcggcgaggagctgtcggtggatgacgctttgctcattaccggagccgtttctcagcactatattggaaaactggcatctgctcttcaccgcaaacaggtttccgaggcattggaaacactgaatgaattgctccagcaggggaaagatgcggccaaactgattgaagatatgattttctatttcagggatatgctcttgtaccaggccgctcccggtttagaaggagtcctggagaaggtgaaggtcgatgaaacgtttcggaatctgagcggtgacataccggcccccgctttatatgagatgattgatatcctgaataaaagccatcaggaaatgaagtggacgaaccacccaagaatcttttttgaagtggctgtcgtgaaaatatgccaaacggcacagcaatccgccggagacatccctgaggtcggcatgctgatgaataagatccagcagcttgagcaggaagtagaaaggctgaaaacctccggtgtgaaggttcagatggaaagcgctccgaaagaagctccgcgtcctcaaaaaggcggaaaaagccattataaagccccggtcggaagaattcatgagatattgaaggaagccacaagacctgatcttgaacagcttaaaagcagctggggcaagctgctggcacacctgaaacagcagaataaggtgtctcatgcggctcttttgaatgacagtgaaccggtggccgctgctcaaaaggcatttgtgcttaaatttaaatacgaaatccattgtaaaatggttgcagaagacaataacggagtccgtacgaatcttgaacagattctcgaatcaatgctcgggaaaagaatggatttgattggcgttccggaagcacaatggggtaaaataagagaagaatttttaaatgatcaccagcaggaaagtgaaggatcaaacgaaccggctgaagaagatccgctgattgcagaggcgaaaaaacttgtcggagcggatttaatcgaaataaaagactaataagatgaaagagagtgattgaatatgcgtggcggaatgggaaacatgcaaaaaatgatgaaacaaatgcaaaaaatgcaaaaggatatggcgaaggctcaggaggaacttgctgaaaaagtgcttgaaggcactgcgggcggcggtatggtgactgtaaaagtcaacggccaaaaagaagttgtagacgttgccattaaagaagaagttgttgatccggaagatatcgaaatgcttcaggacctggttcttgctgcgacaaacgacgccctcaaaaaagtggatgacatgacgaatgagacaatgggacaatttacaaaaggaatgaacataccgggtttattctaggggataaataaacatgcagtatcctgaaccaatatcaaagctgattgacagctttatgaaattgccagggatcggaccgaaaacagcggttcgtctggctttttttgttctaggtatgaaagaagacacagtattggattttgctaaggcgcttgtcaatgcgaagcggaatctgacatattgctcgatttgcggacatattacagatcaggacccttgttatatatgtgaggacacaagaagagataagtctgttatttgtgtcgtgcaggaccctaaggatgtgatcgcgatggagaaaatgaaggaatataacggccagtatcatgttcttcacggcgcgatttcaccaatggacggcatcggtccggaggatattaagattccggagctgctgaaacgtcttcaggatgatcaagtgacagaagttattctcgcaaccaaccctaatattgaaggggaagcaacagcgatgtatatatcaaggctgttaaagccctcaggcatcaagctctcccgtattgcccacggtctgcccgtcggcggtgatttggaatatgctgatgaggtcactctttcaaaagctcttgaaggaagacgtgaattgtaagggaggaaaaggcaaggcatgggttttcttcgcagaaatacattaagaaaagagtttgacgagaagctgatagaacagctctttaaacaaaaagaagaatggaacagacagaagagtctggtcgagaaaagtctagagccctccgctgaggtgttgtttgagctgaaagtcgctgaatctaagtactttttttatttgaaagaagcgaagcagcggaatttgaaaatgagcagatggaagtaagaggtctattctccggaatcttctcataagcttgtactaaacaagcgagggggaagattcatggagccttttttcattatcggtttgattgtcggtctggttgctttgctttttttatggggagtatcttcaaaaccgttaaggtggattggtgtgactgccattaagtttattgccggcgcgattctgttggtgggtgtgaacttgttcgggggcagtctgggtattcatatccctgttaacctgattacaacgggcatcagcggaattcttgggattcccggtatcgcggctttgatagtcattaaacgcttcatcatttaatttgtcgattattgttgacatgttggatcaagggtggtattctaatatacgtcgctgatgacgaaacgaattcttgaaaaagaaattttaaaaagttattgacgacaatgacactgagatgttataataattaagtcgcttcaagagcgatggacaaagttctttgaaaactaaacaagacaaaacgtacctgttaattcaaagttttaaataaatcgcacagcgatgtgcgtagtcagtcaaacactttatcggagagtttgatcctggctcaggacgaacgctggcggcgtgcctaatacatgcaagtcgagcggacagatgggagcttgctccctgatgttagcggcggacgggtgagtaacacgtgggtaacctgcctgtaaggctgggataactccgggaaaccggggctaataccggatggttgtctgaaccgcatggttcagacataaaaggtggcttcggctaccacttacagatggacccgcggcgcattagctagttggtgaggtaacggctcaccaaggcgacgatgcgtagccgacctgagagggtgatcggccacactgggactgagacacggcccagactcctacgggaggcagcagtagggaatcttccgcaatggacgaaagtctgacggagcaacgccgcgtgagtgatgaaggttttcggatcgtaaagctctgttgttagggaagaacaagtgccgttcaaatagggcggcaccttgacggtacctaaccagaaagccacggctaactacgtgccagcagccgcggtaatacgtaggtggcaagcgttgtccggaattattgggcgtaaagggctcgcaggcggtttcttaagtctgatgtgaaagcccccggctcaaccggggagggtcattggaaactggggaacttgagtgcagaagaggagagtggaattccacgtgtagcggtgaaatgcgtagagatgtggaggaacaccagtggcgaaggcgactctctggtctgtaactgacgctgaggagcgaaagcgtggggagcgaacaggattagataccctggtagtccacgccgtaaacgatgagtgctaagtgttagggggtttccgccccttagtgctgcagctaacgcattaagcactccgcctggggagtacggtcgcaagactgaaactcaaaggaattgacgggggcccgcacaagcggtggagcatgtggtttaattcgaagcaacgcgaagaaccttaccaggtcttgacatcctctgacaatcctagagataggacgtccccttcggggcagagtgacaggtggtgcatggttgtcgtcagctcgtgtcgtgagatgttgggttaagtcccgcaacgagcgcaacccttgatcttagttgccagcattcagttgggcactctaaggtgactgccggtgacaaaccggaggaaggtggggatgacgtcaaatcatcatgccccttatgacctgggctacacacgtgctacaatggacagaacaaagggcagcgaaaccgcgaggttaagccaatcccacaaatctgttctcagttcggatcgcagtctgcaactcgactgcgtgaagctggaatcgctagtaatcgcggatcagcatgccgcggtgaatacgttcccgggccttgtacacaccgcccgtcacaccacgagagtttgtaacacccgaagtcggtgaggtaacctttatggagccagccgccgaaggtgggacagatgattggggtgaagtcgtaacaaggtagccgtatcggaaggtgcggctggatcacctcctttctaaggattttaacggaatataagaccttgggtcttataaacagaacgttccctgtcttgtttagttttgaaggaattttgattctttcatatggtagatgggcctgtagctcagctggttagagcgcacgcctgataagcgtgaggtcggtggttcgagtccactcaggcccaccatctttacccaatacggggccttagctcagctgggagagcgcctgctttgcacgcaggaggtcagcggttcgatcccgctaggctccaccaacgtgttctttgaaaactagataacagaagtaattcacattcaattagtaatgcaagatatcacgtagtgattctttttaacggttaagttagaaagggcgcacggtggatgccttggcactaggagccgatgaaggacgggacgaacaccgatatgcttcggggagctgtaagcaagctttgatccggagatttccgaatggggaaacccaccactcgtaatggagtggtatccatatctgaatacataggatatgagaaggcagacccggggaactgaaacatctaagtacccggaggaagagaaagcaaatgcgattccctgagtagcggcgagcgaaacgggaccagcccaaaccaagaggcttgcctcttggggttgtaggacactctgtacggagttacaaaggaacgaggtagatgaagaggtctggaaaggcccgccataggaggtaacagccctgtagtcaaaacttcgttctctcctgagtggatcctgagtacggcggaacacgtgaaattccgtcggaatccgggaggaccatctcccaaggctaaatactccctagtgaccgatagtgaaccagtaccgtgagggaaaggtgaaaagcaccccggaaggggagtgaaagagatcctgaaaccgtgtgcctacaagtagtcagagcccgttaacgggtgatggcgtgccttttgtagaatgaaccggcgagttacgatcccgtgcaaggttaagcagaagatgcggagccgcagcgaaagcgagtctgaatagggcgaattgagtacgtggtcgtagacccgaaaccaggtgatctacccatgtccagggtgaagttcaggtaacactgaatggaggcccgaacccacgcacgttgaaaagtgcggggatgaggtgtgggtaggggtgaaatgccaatcgaacctggagatagctggttctctccgaaatagctttagggctagcctcaaggtaagagtctcggaggtagagcactgattggactagggcccctaccgggttaccgaattcagtcaaactccgaatgccgatgacttatccttgggagtcagactgcgagtgataagatccgtagtcgaaagggaaacagcccagaccgccagctaaggtcccaaagtatacgttaagtggaaaaggatgtggagttgcttagacaaccaggatgttggcttagaagcagccaccatttaaagagtgcgtaatagctcactggtcgagtgactctgcgccgaaaatgtaccggggctaaacgtatcaccgaagctgcggactgttcttcgaacagtggtaggagagcgttctaagggctgtgaagcaagaccggaaggacttgtggagcgcttagaagtgagaatgccggtatgagtagcgaaagaggggtgagaatcccctccaccgaatgcctaaggtttcctgaggaaggctcgtccgctcagggttagtcgggacctaagccgaggccgaaaggcgtaggcgatggataacaggttgatattcctgtaccacctcctcaccatttgagcaatggggggacgcaggaggatagggtaagcgcggtattggatatccgcgtccaagcagttaggctgggaaataggcaaatccgtttcccgtgaaggctgagctgtgatggcgagcgaattatagtagcgaagttcctgattccacactgccaagaaaagcctctagcgaggtgagaggtgcccgtaccgcaaaccgacacaggtaggcgaggagagaatcctaaggtgatcgagagaactctcgttaaggaactcggcaaaatgaccccgtaacttcgggagaaggggtgctctgttagggtgcaagcccgagagagccgcagtgaataggcccaggcgactgtttagcaaaaacacaggtctctgcgaagccgtaaggcgaagtataggggctgacgcctgcccggtgctggaaggttaagaggagcgcttagcgtaagcgaaggtgcgaattgaagccccagtaaacggcggccgtaactataacggtcctaaggtagcgaaattccttgtcgggtaagttccgacccgcacgaaaggcgcaacgatctgggcactgtctcaacgagagactcggtgaaattatagtacctgtgaagatgcaggttacccgcgacaggacggaaagaccccgtggagctttactgcagcctgatattgaatgttggtacagcttgtacaggataggtaggagccttggaaaccggagcgccagcttcggtggaggcatcggtgggatactaccctggctgtattgaccttctaacccgccgcccttatcgggcggggagacagtgtcaggtgggcagtttgactggggcggtcgcctcctaaaaggtaacggaggcgcccaaaggttccctcagaatggttggaaatcattcgcagagtgtaaaggcacaagggagcttgactgcgagacctacaagtcgagcagggacgaaagtcgggcttagtgatccggtggttccgcatggaagggccatcgctcaacggataaaagctaccccggggataacaggcttatctcccccaagagtccacatcgacggggaggtttggcacctcgatgtcggctcatcgcatcctggggctgtagtcggtcccaagggttgggctgttcgcccattaaagcggtacgcgagctgggttcagaacgtcgtgagacagttcggtccctatccgtcgcgggcgcaggaaatttgagaggagctgtccttagtacgagaggaccgggatggacgcaccgctggtgtaccagttgttctgccaagggcatcgctgggtagctatgtgcggacgggataagtgctgaaagcatctaagcatgaagccccctcaagatgagatttcccattccgcaaggaagtaagatccctgaaagatgatcaggttgataggtctgaggtggaagtgtggcgacacatggagctgacagatactaatcgatcgaggacttaaccaatttgaatgtatgcttactgttatctagttttgagagaacactctcaatggtttggtggcgatagcgaagaggtcacacccgttcccatgccgaacacggaagttaagctcttcagcgccgatggtagtcgggggtttccccctgtgagagtaggacgccgccaagctatcattacggtaaaggcagctcatcatgagctgccttttttgtttttgaataaaaacgaaacaaacaccgaaatacgggaacgcccatatactaattgcaaacttcaaaaagatccaaattgtgtatacaatcaacagtttaagggaaggctattcatacggaggtgggcaaaatgaatgaaacgtccggccatgaagaaacatgtattgtgtgtgaaaccaagaaaagcaggggaatccatatttatacgaaatttatatgtttagagtgtgagaagaaagtagtttccactccgacctctgatccgaattatgaatttttcgttcgtaaattgaaaagccttcatacaccgacgttatattcttaaccctgaaaagggtcttttttttgcctgaaatcagaggagttttttcactttttataaaagaactgatacgataagaagaggaacttgtttagacatggaatgtaatagataatactgataaaagtgaataaataggagtcgatcaagtatgaaaccgtttattcaatatatgaaatggacattttgcggcagcacagtttttgtattagcggggataaccttctttacgatagggcaccagccttttctgtattcgcttttatacggggcggccggcggagccgcagtcagtgcgtccggcttgtggaatgcgaagcgtctctttttaaaaaaacaccggctgacaagaaaagaatatgcttatatcaaggaaaatctcgaggaagcaaagggtaaaatcatccgattacgcagggcgcttttccgctctaaaagtatacaaatgctgaagcagaatgcagagatactgcggataacccgacgaatatatctgctcacaaagcaggagccgaagcgtttttatcaggcagagcgtttctattatcaaacgcttgattctgttgtggaactgacggaaaagtatgctttgctctcatcacagccgcgaaaaaataaagatttatcaatgtccttgagtgagacgaggatgactctggcggagctttccagaaggctggaagaagatcttcatgaactgatgaaggaggacatcgacgacctgcactttgaattagatatggcaaagcattcactgagaaaataagaaaggaagaaggaaatggccaaagaccgttccgacgacagtatgggcgcccaaaatgaccagactcatctaaagcttgcagatacgctgccggaagaaaaaagagaagcggcacttcagctcgctgaaaaactggaccctggaaacatgcaaagcattgttctgtttggttcacaggcgcaggcgaatcttctggaattttcccacacgatgatagagcacgtgcaaagaaaagatgcaggagagatgggacagatattggctgatctgatgctgaagcttgaccaggtaaaccccgatgatctgcaggtaaagaacaaagggtttttcgcccggctgtttaaaagggtatccggatctgtgcaggaagtgctttcgaaatatcaaaagacaagtgtgcagattgaccgtatcagcagaaggctggaacattctaaaaatgtgctgttgagtgacaataaatggttagatcagctgtacgtccaaaataaacaatacttttctgatttaactatgtatatagcagcgggtgaattaaaattagatgagctgaaaacaaagcttattcccgaagtggcaagaaaagccgaattacgaaaacacaatcaaatggccgcacaggaagtgaatgatcttcgccagtttgccgaccgtctggataagagggtgcatgatctgctgctgagcaggcagattacgcttcagagtgcgccgcaaatccgtctgattcaaaacacgaatcaggcactggcagagaaaattcagtcctccattgttacggctattcctttatggaagaatcaagtcgccatcgcgctgacgcttatgaggcagcggagtgcggcagatgtgcagaagaaggcggcggatacgacaaatcaattgctgctgaaaaacgccgaacttctgaaaacaagcacagtcgagacggccaaagccaatgagcgcggacttgttgaggcagacaccctcaaaaaagtgcaggaaagcttagtcagcacacttgaagaaatcatgtctattcaagaagaaggcaggatgaaacgcaggcgtgccgaggaggagcttgttatcatggaaggcgatttaaaaaagaagctgcttgatatgagttccggccgggataacggctagatggcaaaaagtcttagctttaagttggctcgcaggcacgatataataagaaagacaggcaaaggatttgtttaaaaatggacacacctttatatacagcgctgatgaagcatgcgcaccgaaatacgtattcttttcatgttccgggacatcacaatggagatgtcttttttgatgaagcgaaatctgtatatcaatctcttttatctattgatatgactgagatcacgggtcttgatgacttgcatcacccgacaggggtcattaaggaagcgcaggatttggtgagcagattgtacggctctcaggaaagcttctttctcgtcaacggaacgaccgccggcaatctggcgatgattttagctgtttgtgaaccgggtgaacccattctgatccagcgtaattgtcacaagtctgttttccatgcggtggcattggccggagccaagccggtttatttggcgccggaaatcgatgaaaatatgcatgtgccggcacatgtatctctttcagtcatcgaaaaagcgctggcgtcatatccgaacgcgaaaggacttgttttgaccaatccgacttattacggacacgccgccgatttgactgcggcagttaaaaaagcccattcatacggtgttcctgtgctggtggatgaggctcatggagctcactttgtgttagggcagcctttcccgccttcatcattggctatgggggcggacgccgttgttcaatcggctcacaaaacgcttccggctatgacgatgggatcttactttcatttaaacagcacccgaattgacagagatcgattaacttattatgtaagcagtttgcaaagcagcagcccgtcatacccgattatggcatctttagatacggcgcgtgcttatgtgcaggatattgctgaaaaagggacacttcccgtccatatggagcacattgagaaaatcaaacgaaggttcgcatcaatttcttctattgaaataatcgagccttccggatatgggctgcgggcggacccgttaaaattaatacttcggtcaaagctcggacattccggctattcattacaacgcattttggagagtgagggcattgttgccgagctggctgacgagtaccaagtattgctcgtactgtcgataggcggccggcggatgatagaacaggcagccgtaagaaacatacagcagaaactggagaatacaccgcccgataaattgccggatgccgtgaattggacatttccgtccatttcgacacttgaatatccgcaaaatgagatgcggaagtttacaaaagagcctgcagatataaataaggcggccgggcgcttgcatgcggggaacattattccttatccgccgggaattccgctgatcatggacggcgaacggataacagaagagatcgtacagaagctttcccgtttaatcggcatggacgcgcatattcaaggcttgttaaacggggaacaattacttgtctatatagaagaggagaaatcatgagcggtttatttataacatttgaaggtcctgaaggtgcagggaaaacgactgtgcttcaggaactgaaagagattctgtcggcagaggggctcccggtgacagcgacaagagaaccgggcggcatcgacattgcggaacagatcagagaagtgatcttaaataaaaacaatacactgatggatgcaaaaacggaggcgctgctttacgccgcggcgagaagacagcatttaaccgaaaaggtgcagcctgcattgaaagaagggcgcattgtgctgtgtgatcgtttcatcgacagttcgctggcttatcaaggctatgcgagagggctcggcattgatgaagttctttctattaaccagtttgcaatcggcgatacgatgcctgatgtcaccatctatttttctattgagcctgaagaagggttgaaacggattacgtcgaatgattcaagagaaaagaatcgtctcgatcttgaggctctgcactttcacacgaaagtacgggaaggataccaaaaggttatgcagcgttttccggaaagattccatacaatcgacgcatcgaaaaagaaggaactcgtcattcaggacgcacttcaagtgataaatgaagcattgaaaaaaattcagttgtgacctgtttctcataagttgctataatgaatgtaacgacaatgttctttccaacctaaagggggcctagagaatgaaattaatagtggcagtggtgcaggatcaggacagcaacaggcttttgaaagtattaaccgaccacaacttcagggtgacgaagcttgcgacaacaggcggattccttaaatcaggcaatacgacgtttatgatcggggtggaagatatccgtgtcgataaagcgctcagcctcattaaagagaatggctgtaaacgtgatcagatgattgccccggtatccccgatgggcgggaatgcggattcctacgttccatatcccgtcgaagtggaagtcggcggagcgacggtctttgtcctcccggtcgatgaatttcatcaattttaaggatttgacgacgtgaaaataaattctgacttacgtacatttattgagaaaaagcagcagcctgcttataaagcggcagagctttccggaacgtttaaaagttcaatggacagccaaagcagcaagctgaaatttgatcagctgagcaggttcttaacggatatagaaacgttcgggaaaaggctgacgaagtcgagaaacttcaaagacttagcgaagttcaaaggattggtaaaacgttttgtaaaagaggccgtagacagcggattatcgcatgagacggagaaaagctttgacttgtacggcagcagccggaccctggggcttgtgaaagaaatagatgaaaaactgcttcagctgacggaagaaatgttagatcaggaaaaaccggcaattgatttgctggatcgaatcggagaaataaaaggtttattgattaacctttacacatagagagtgatacaatggcaatatcatggaaggaaatgaccgggcagcagcccagagtgatgcggcttttgcataacagcattgaaaagaaaaggctttctcacgcatatctgtttgaaggcaaaaaaggtacgggcaaattggatgccgcactgcttctcgcaaaaagctttttttgccttgaagacgggactgagccttgcggagagtgccggaactgtaagcgtatcgaatccggaaaccatcccgacctgcatgtggttcagcccgacggattatccattaaaaaggctcagatccaatcgcttcaggaagagttttccaaaacggggctggaatcgcataaaaagctgtacattatatcccatgcggatcaaatgaccacaaatgcggcaaacagtctgctgaagtttttagaggagccgagtcaagacaccatcgcaattctgattactgagcagctccaccgaatactggataccatcgtttcgagatgtcaggttctcccgttccagccgcttcagccgaaagccatagaagaaagactgattgaacaggaagtgagccctcacatggcccggctcttagcaaatatgacaaataatattgcggaagcagtcgaattaagtcgaaatgatgagtttgcagagtccagagcgaaagtgataaaattgtatgaagtcttacatcagcggaaaggacatgcctttttcttcattcaggatcagtgggtgccctttttcaaagaaaaaacccatcaagaaatgggtcttgatatgctcttattgatataccgtgatgtattatccatccaaattggaaatgaagataaactgatttatcaagacttattccaatcaataaaacagcatgcgctgcaatttacacaacaaagcgttacgaaccaaattctcgctgttttagaagcaaaaaaacggcttcattccaatgtgaatgtgcagggattaatggagcacttggtgttaacgttgcaggagggataagcttgtacaacgtaataggcgtccgctttaaaaaagcggggaaaatttattattttgatccgaatggatttgatatagaacaagacagctgcgtcattgttgaaaccgtaagaggtgtagaatacgggcaggttgtcatcgcaaataaacaagtggacgagcatgatgttgtgcttccgcttcgaaaggttattcgcgttgctgatgaacgcgatcttctcattgtagaagaaaacaaacaggaggccctgtccgcttttgaagtctgtcagaaaaaagtggctgaccacggcttagatatgaagctggttgatgttgaatttacgtttgaccgcaataaagtcattttttactttacggcagacggacgggttgatttcagggaattggtcaaagacttggcttctatctttaaaacgagaatcgaattgcgtcaaatcggggtaagggacgaggcgaaaatgctcggcggtatcggaccatgcgggagaatgctttgctgctccacgttcctcggtgattttgaaccggtgtccatcaaaatggcgaaggatcaaaatttatcgttgaacccaacgaagatttccggtctgtgcggccgtttgatgtgctgtttgaagtatgaaaatgatgagtatgagacggcaaaagaacagctgccggatttaggcgaaatgattacgacggcaaacggccccgcaaaggttgtcggtcttaatattctggaacgggtgcttcaggtggaactgaagaatcgtgaaaaagtgatagaatatacttgggaagagctcttggaagagggcgtcgtatccgcacaaaccacagattaacgaggtgtggaaccttggataaaaaagagttatttgatactgtcataaacctggaggaacaaatcggttcgctgtaccgtcagctgggtgacttaaagcagcatatcggcgaaatgattgaagagaatcaccatcttcagcttgaaaataagcatttgcgtaagcggcttgatgacacgacggagcaaattgagaagttcaaagccgatcagaaagaaacaaaaacacagaaggcagagcagagtgatataggagaagggtacgacaatctggcccggctgtatcaagaaggctttcatatttgcaacgtccattatgggagcgtccgcaagggagattgccttttttgtctgtccttcttaaataaaaaataaggaaaaggcttccgctgatgtcggaagcctttttcaaagagtgccgaaaggaataagattatggtttcattacgtgatgatgaaagattggattacttattagcagaggatatgaaaatagtacagagtccgacggttttcgctttttcattagatgccgtgctgctgtctaagtttgcatacgttccgattcaaaaggggaacattgttgatttatgcacggggaacggcattgtgccgcttttgctcagcacaaggtcaaaagccgatatcaccggagttgaaattcaggaacgcttgtatgatatggcgcttcgaagcgtggaatacaacgggctgggcggtcagatcagtctcattcatgatgatctgaaaaatatgccggaaagactcggacataataaatatgatgttgtcacctgcaatccgccttattttaaaacaccgaaagaggcggagcagaacctgaacgagcatctcagaatcgcaaggcacgaaatcctttgcacgcttgaagatgtgatttccgtcagcagcaaactgctgaagcaaggaggaaaagcggctctcgttcatcggccggggaggcttctggaaatctttgaactaatgaaagcataccgaatagaaccgaaacgggttcagtttatttatccgaaacaaggtaaagaagcgaataccattttggttgaaggaattaaaggcggccgccctgatctcaaaattcttcccccgctctttgtatataatgaacaaaatgaatatacgaaagagatccgcacgattttatatggagacaaatagtcatttcttttatgtgctgctgtgcaatgacaacagtctgtatgccggttatacaaatgatctgcaaaaacggctgaaaacccacaatgagggaaagggcgcgaaatatacaagggcgagaaggccggtttcgttatgccatgcggaatcatttgaaacaaaacgggaagcgatgcaggcggaataccgttttaagcagctgacccgaaagaaaaaagagcaatatatagaagaaaaacgacgcagcaaggaggctgtatatgttaagacgtcagatgagttttaacggaaaatctgaaatgggaactctgtaccttgttcctacaccgatcggcaatttggaggacatgacctttcgtgcagtagagacgctgaaatcggccgatgtcatagctgccgaagatacgagacagacgaaaaagctgtgccatgtttatgacatagaaacatctctcatcagctatcatgaacataataaagaaagcagcggccataaaatcattgaatggctgaaaagcggaaagaatgtggcattggtcagtgatgccggtatgccgacaatttccgacccgggggctgagattgtgagagatttcacccaaatcggcggatatgtcgttccgcttccgggtgcaaatgcggcattaaccgcgctgactgcatcagggatcaccccgcagccgtttttcttctacggattcttaaacagacaaaaaaaagaaaagaagaaagaactcgaaatcctgaaaaaacggcaggaaacgatgatattttacgaagcgccgcacagattaaaagaaacattaacagcaatgcatgacgttttgggtaatcgaaccatcgccgtcacgagggaattaacgaaaaagtatgaggaattcatcagaggaaccatcgccgaggtgcttgaatgggcaaatgaagatcaaatccgcggtgagttttgtctcgttgtcgaaggcaatcaaggcgctgaaccggatgaagaggaaaagccttggtgggcggagctttctgagaaagaacatgtggagcattacataaatgaaggatcttcttccaaacaggccataaaacaaacagcggtagatcgggacgtaccgaaacgcgagatttatgacgcttatcacattcaatcataaaaaaaaccgttcttgtgtcataacaagaacggtttttgtatgaaatagcttatttttggttttgaagctggttttgaatttcagagatgatttgctcagcgccttctttgctgagtaccaatttgccgccggcaagtttaaggttatcatcagaaacttcaccagttacttggcaagtcatgtttggtttatattttttaaggatgattttttcatcatcaacataaatttcaagagcgtctttttctgcgatgcccagtgtacggcgaagttcgatagggataacgacgcgtccaagttcatcaactttacgtacgataccagtagatttcattaacagtctcctcccgagagataattatttgtagtttatatttttcttcgtcattattcgacaaaattccttacattcctagcataacaaggtttccaataatcgtcaatctttttgtttgctattgtttgtaagaattagttcttatagtaagtaaagccttggaaatcctgaaataacaggctttttgactgctttttcgaacctattatcctactgaaaatccttttaaatcaagactttcgaaccaagatgttttatattagtagattatatacgacaaatttcgacatgttaagactttttttaatttcaataaaaatttttaattttatttactcttttacgcgcagtacgtatatatccttgatcttaaaggctaagatggtatcatagatagaggacaaatatcaatattgtatatcaaataaaaccgctctcgtcctttgggcgtgagcttttcgacattctgaatgggaggttgcaacatgccgcaagacaataatactttttatattacgaccccgatatattatccgagcggaaaattacatatcggccatgcttatactaccgtggcaggcgatgcgatggcgcgttacaaaagattaaaaggatttgacgtacgctacttaaccggaacggatgagcacggacagaaaatccagcagaaagcggaggaagagaatatcacgcctcaagcttatgtggatcgcgcagttgctgaaatccaaaagctatggaagcagctcgacatttctcacgatgatttcatccggacgacggaaagccggcacaaagaaattatcgagaaagtgtttcaaaaacttcttgataatggtgacatttacctggatgagtatgagggctggtacagcatccctgatgaaacattctatacggaaacacagctggtggatgtggaacgaaatgagaagggtgaggttgtcggcggaaaaagccctgacagcggccacccggtcgaattaatcaaagaggagtcatacttcttccgcatgagcaaatatgcagaccgcctgctgaagttttatgaggaaaatccttctttcatccagcctgaatcacgcaaaaatgaaatgattaacaacttcattaaaccggggcttgaagatttggccgtttccagaacgacgttcgactggggcgtaaaagtgccgggaaatccgaagcatgtcgtgtatgtatggattgacgcactgttcaactatattacagcgctcggttacgatacggaaaatgatgagctttacaaaaagtactggccggctgacgtccaccttgtcggtaaagaaattgtccgttttcataccatttactggccgattatgctgatggcgcttgatctcccgctgcctaagcaagtattcgcgcatggctggttattgatgaaagacggaaaaatgtcgaaatcaaaaggaaatgtcgttgatccggtaacgttaattgaacgctacggcttggatgaacttcgctattacctgcttcgcgaagtaccgttcggttcagacggtgtctttacgccggaaggtttcgtagaacggattaattatgacttggcgaacgacttaggaaaccttctgaatcgtacagtcgcaatgatccaaaaatattttgacggcgagattggttcatatgaaggaaatgtgaccgattttgattcagagctttcttccgtagccggtgaaacggttaaagcttatgaaaaggcaatggaaaacatggagttttcagtagctttatcaacgctatggcaattaatcagccgtacgaacaaatatattgatgaaactgctccgtgggtgcttgctaaagatcaggaaaaagaaaaagaattacgttctgtcatgtatcatttagctgaatcattgcgtatttcggccgtattgctacagcctttcttgacgcagacgcctgaaaaaatgttttcccagctcggagttgaggatcagtctcttaaagcttgggacagcattcagacattcggccaattgaagaatgtgaaagtgaaaaaaggggaaccgcttttccctcgtcttgaagctgaagaagaagtagcttacatcaagcaaaaaatgcaaggaactgctcctgctaaagaagaaaaggcggaagagccgcaagaagcagagcgtcttcctgaaattacgtttgatcaatttatggatacagaacttcgcgtcgcagaagtcttgtccgcggaaccggtgaaaaaagcagatcggctgctgaaattgcaaattgatctgggctttgaacagcgccaagttgtatcaggtatcgcgaagcattacacaccggatcagcttgtgggaatgaagatcatctgtgtaacgaatttaaaaccggtaaaactgagaggcgagctttctcaaggaatgatactggcgggagaatcggacggcgttctcaaagttgtagctgtcgaccagtcattaccgaaaggcactcgaattaaataataggggcaaaaggtgtttcacgtgtaacattccgtcgaacaccttttgtttttcaacaagaaaggagtttttatgatgctttttgatacacatgcgcacttaaatgccgagcaatttgacacagacttagaggaagtcattgcgcgtgcaaaggctgaaaaagttgaacgaattgtcgttgtcggattcgacaaacccactatcacgcgtgcgatggagctgattgaggaatatgactttatatacgctgcgatcggctggcatccggtagacgcaattgacatgacagaggaagatttatcatggattaaggaactgtcctctcacgaaaaagtcgtggcgatcggagagatgggccttgattaccactgggataaatcaccaaaagacattcagaaagaagtattccggaaacaaatcgctctcgccaaagaagtgaaccttccaattatcattcataatcgtgatgcaacggaagatgttgtcacaattttgaaagaagagggagcggaagaagtcggcggcattatgcactgctttacggggagcacggaggttgcacggcagtgtatggatatgaatttctatatttcattcggcggaccggttaccttcaaaaatgcgaagaaaccaaaagaagtagcaaaggaaattccgaatgaccgtttgctgattgaaacggactgtcctttcctgacaccgcatcctttccgcggcaaacgaaatgagccaagctacgtaaaatatgttgctgaacagctcgctgaattaaaagggctgacatatgaagaaattgcctcaattacaaccgaaaacgcaaaaagacttttccgcatgaactgacagaatgcgctgtcataacgtgtaaaagcttgtccgattcagtggatatgtaaaacggttctacaagcttccttctcctcataagataggttgtcgatatgtctctcttcctttttttgctttgtttttgcataatgagggatacgctgaaggtttttcatcttcgagatgggagggttgacagcattttagatactctatataatctctccgaggagaaggaggcgtttttcatcacacaaaaaatgaaaaaactgttttccgtaaagcttggtaaaagcaaggttattctgattgcagctattattctgctgggcggaaccgggactgcatacggggcacatgagctctcaaaacaatcagtttctgtttccatcaacggcaagaaaaagcaaatacgcactcatgcaaaaacggttggggaacttctggaagatttacatatagagacgagaaatgaagaccggattaccccgtctaagcagacagcattggcagacaacatgaatgtcgtgtatgatgctgcaaagcagatccgtgtgacaagaggcggagaagaaaagactttatggtcaacggcaaaaacagtcggcgcatttctgaacgaacagcatacacctgtgaatcagcacgataaaatagatccagcagcagatacgaaagtgacaaacggcatgaaagtcacggtcgacccggcttttcaggtcactgtaaatgatgcgggaaagaaaaagaaaatatggacgacttcgactacggtcgctgactttttaacgcagcataagatggacatgaaagacgaagataaagtaaaaccggcattacacgaaaagctcacaaaaaatcaggccggcatacaaatcactcgtatcgaaaaagtcaccgatgtagttgaggaaaaaatagcgtatcaagtgaaagaaaaagaagatgcgtctctcgacagcgggaaagaaaagatcgttcaaaaaggaaaagaaggcaaacttaaaaagcattttcatgttgtcaaagaaaatggaaaagaagtatcaagaaagcttgtcaaagaagaaacatctgaaaaaagcaaagatcagatcattgcggtcggcacaaagcggcacagtcccaagattgagcagctcagtgcacctgtgaaggcatcttcgggcgaaaccggatcttccggtaaagtgattaccgtgtcttccacggcttataccgcaagctgcagcggctgttccggccaaacggctacaggcgttaacctgacaagcaatccgaatgccaaagtcattgcggtagacccaagcgtcatcccgctcggcacaagagtccacgtagacggatacggggatgccgtagccgctgatacaggctcagccattaaaggaagacggattgatgtctttttccctgaaaaatcttcagcttaccgctggggaaagaaacaggtcaaaataaaaatcttaaattaattccgattcattcagagggttttgcgccctctgtttttttcgttataataggtaaagtgtattttcagtatattagacgtgacatgcaagcaaaggtttcgttttggatataaaaagtttttttggaggaagtaatgaaaattaaagaaattatagtagtcgagggacgcgatgacactgcgcgcataaaacttgccgttgatgcggatacgatcgagacaaacggttccgcaatcggagacgaagtcatcaggcagattcggctggcgcaggaaacgagaggggtcatcgtgctgacggacccggattttccgggggagaagatccggaaaaccatttctgaagcagtacccggctgtaaacacgcatttctgcccaaacatcttgccaaaccgaaaaacaagcgcggcattggcgttgagcacgcatccattgaaagcatcagagcatgtctggaaaatgtgcatgaagagatggaggcaaagccgagtgaaatttcagctgaagatgtcatacaggccggtctgatcggcggaccggctgccaaaagacggcgcgaacgattgggcgacctgctgaagatcggctatacaaacggcaagcagcttcaaaaacggctgcaaatgtttcaaatcaaaagaagtgattttattgatgcgctcgatgctatgaggcaggaggaacaggatgaacaataaagatatcgcgacacctatcagaacgaaggaaattctgaaaaagtacggtttctcttttaaaaagagtctgggacagaatttcttaattgatacaaatatattggacagaattgtggaccatgcggaaattacggatcggaccggagtcattgaaatcgggcccggaatcggcgcgttgacagagcagcttgccaaacgggcgaaaaaggtcgtcgcgtttgaaattgatcagcgtctgctgcccattctcaatgatacgctgtctccgtatgacaatgtaacgatcattcatcaagatgtgctgaaagcagacgtcaaatccgtcattgaagagcagtttcaggattgtgatgaaattatggtgacggcgaatctcccatattatgtgacgacgccgatcatcatgaagcttttggaagaacatcttccgttaaaaggaattgtcgtaatgctgcaaaaagaggtcgctgagcggatggccgctgatccttcctctaaggagtacggatcgctttccattgcggttcagttctatacggaggccaaaaccgtcatgaccgtaccgaaaacggtgtttgtgcctcagcctaatgtcgattccgccgtcatccgtctcttgcttcgtgacggcccggcggttgacgtcgataatgaaccgtttttcttccagctgattaaagcaagcttcgcacagcgccggaaaaccttgctgaacaaccttgtgaacaatcttccgggcggaaaagagaaaaaagctcaaattgaagaagttcttcaagaaacgaatattgatggaaagcgacgcggtgaatccctgtccatagaagaattcgcgctcttgtccaacggattgcataaagcccttttctaagagggctttttgttttgcgtcaccacttggactgccgctacataggctagaggagaaccttattcattcaactgcaagaaaagcttgaaacatcaagcgccgcagcggaaagaggtgcatttgccaagacttctttcatgatgaggcttagtctatttgtggagtgggtaacgtgcaatttcaaataggagatatggtagccaggaaatcctatcaaatggatgttttatttcgcattatcggtatagagcaaacaagcaacggaaattcaattgccatcctgcatggtgacgaagtcagattgattgcggatgctgatttttctgatttggagcctgtcagaaaagacgaacaggccatgagaaagaaaagagatgaaagcaggatgaatgaatctctcgagctgctccgccaggattataagctgcttcgggaaaaacaggagtattacgcgacaaatcaatatcagcatcaggagcactactttcatatgcccggaaaggtattgcatctggacggcgatgaggcctatttgaaaaagtgcctgaacttttatgaaaaaatcggtgtgccggtatacggaattcattgccatgagaaaaaaatgccggcgtcaattgacgagctgcttgataaatacaggccggatattttagtcatcaccggccatgatgcatattccaagcataagggaggcgtgaacgatttaagcgcctacaggcattccaaacactttgtcgaaaccgttcagagagcgaggcgtaaagtccctcatttggatcagctggtcatattcgcgggggcgtgccaatctcattttgagtctttaatcagagcgggcgcgaatttcgcaagttcgccgtcacgcgtcaatattcatgcgcttgacccggtatatattgtcgcgaaaatcagcttcactccgtttatggagcggatcaatgtatgggatgtcctgagaaatacgctgacgagagagaaagggctgggaggaattgaaacgaagggtgtgctgcgtgtcggtatgccgtataaatcaaatggatgagtgataaaacccgcatatatttcgctatgcgggttaattattttacatattgatacataaatttccggaacttgtgaaaaataacgcagaaatcaatagaattttgtcaaaataattttgttgacaatgacttattaacgttgatataatttaaattttatttgacaaaattgggctcttgttgtacaataaatgtagtgaggtggatgcaatggcgaagacgttgtccgatataaaaagatcgcttgatgggaatttaggtaaacggcttacgttaaaagcaaacggcggccgccgaaaaacgattgagcgttcgggcattttagctgagacgtacccttctgtttttgtgatacaactagatcaagacgagaattcgtttgaaagagtttcatacagttatgctgatattctgactgagactgttgaattgacattcaatgacgatgcggcaagctcagtagcattttaatgggcagtgaaccttttgtttactgctttttgttttgccttctaaagctcttctaattattccctcgaaagtttcagccgattaaacggaagctataggtgtcacatgttttatcgtggcgtgcacgaatggtgatcaattctataaaaggggttgtttcgtttgggcagacgtcgtggagttatgtcagatgagttcaaatatgagctggcgaaggaccttggtttttacgatacggtgaaaaacgagggctggggaggcattcgggcgcgtgacgccgggaatatggtaaagcgcgcgatcgagattgccgaacagcagatggcggctcagaaccaaaataaccgataatgcagtggcccgggggacaatccgttccccggttttttctatcggctgtcaaaaccggcgtcaatttcggataagtacctccgggtctccaaatgtgatacaatgttcatacttatgtttagatggagaagtaggtgaaagctatgcgtattttagaaaaagcgccggccaaaatcaatctgtccctcgatgtgacgagtaaacgcccggatggttatcacgaagtggagatgatcatgacgacaattgatttggcagatcggattgaactgacagaactgcccgaaaacgttatcagagtggcgtcgcataatcgctttgttccggatgatcaaaggaatctggcttatcaggcagccaaactgcttaaagaacggtttcaagttaaaaaaggcgtttcgattatgattacaaaggtgatccctgtagcggcagggcttgccggcggaagcagcgatgcggcagctacgctcagagggctgaacaggctttgggatttaaagctttctgtcgaagagcttgcagagcttggagctgaaatcggttcagacgtgtccttctgtgtatacggaggcactgccctggcaaccggacgcggtgagaagatcaggcacatcagtgctccgcctcattgctgggtcatgctcgccaaaccgacgatcggggtatcgactgccgaagtgtaccgccggctgaacttacagcaggttcggcatcctgatgtgcaggcgatgattgacgcgattgaagaaaaaagcttccaaaaggtatgcggacaattaggaaacgtattggagtcggttacgctcagcctccatcccgaggtggcgatgattaaaaatcaaatgaaacgcttcggcgctgatgcggtgttaatgagcggaagcggaccgactgtattcggtttggttcaatacgaatcaaaggtgcagcggatttataacgggttaagaggtttctgtgatcaagtgtacgcggtgcggatgatcggcgaacagaatgctcttgattaaatccgtatgttaagttatattatttttaaattattcggattttgggggtaagttcatgaagtttcgtcgcagcggcagattggtggacttaacaaattatttgttaacccatccgcatgaattaataccgttaacgtttttctcagaacggtatcaatcagcaaagtcatcaatcagtgaagatttaacgattattaaacagacctttgaacagcaaggcattgggacgctgcttacagtgccgggagctgccggaggcgtcaaatacattccgaaagtgaaacaggctgaagcagaagcgtttatacaggagctgggacagtctttagtaaatcctgagcgtatccttccgggcggttatgtatatttaacggatatcttaggaaaaccatctgtcctctctcatgtaggcaggctttttgcttccgtttttgcggagcgggagattgatgtggtgatgaccgttgcgacaaaaggaatccctcttgcttacgcagcggccagttatctgaacgttccggttgtcatcgtacgaaaggacaataaagtgactgaaggctccacggtgagcatcaattatgtatcaggatcgtctaaccgcattcaaacaatgtcgcttgcgaaaagaagtttggctacgggttcgaacgttttgattattgacgactttatgaaagccggcggcaccattaacggcatgatcagcctgcttgatgagtttaatgcaaacgtcgcggggataggcgtcttggttgaagccgagggagtgaatgaacggcttgtcgatgaatacatgtcactgctcacgctttcaaccatcaatatgaaagacaaaacgattgagattcaaaacggcaattttctgcgattttttaaagaacagcatttaaagaatggggagacagaaaaatgactaaagcaatccatacgaaacacgcgccggcagcgatcgggccatattcacagggaatcatcgtaaacaacatgttttacagctcaggccagattcctcttactgctgaaggagaaatggtaaacggtgatatcacagaacaaacgcatcaggtgttcagcaatttaaaagctgtgctgaaagaagcgggcgcttctctcgagacggttgtcaaagcaacggtatttattgctgatatggagcagtttgcggaagtgaatgaagtgtacggacaatactttgatgtacataagccggcaaggtcttgtgtggaagtggcgagactgccgaaagacgctctcgtggaaattgaagtcattgcgctggtaaaatcttaaatctcagaaaagtggttccggtctccgggatcactttttttatgcagtatatgatccccaaatatggtttatcacctaattgtgtatgtatatcctatattttcaaaaaaactttttgaaacgtgcaggaatttaaaaagaatcgtggaattgttagactaatgcttttatatagggaaaaggtggtgaactactgtggaagttactgacgtaagattacgccgcgtgaataccgatggtcgcatgagagcgattgcatccatcacgctggatcacgaatttgtcgtacatgatattcgtgtgattgatggaaacaatggtcttttcgttgcgatgccgagtaaacgcacccctgatggagaattccgcgatattgctcatcctattaattccagcacgcggggcaagatccaggatgctgttttaaatgagtatcatcgtttgggtgattctgaagcattagaatatgaagaagccggggcttcttaaacataacaaaatgtaaggactgctgataaaggctgacacaaggccttttccggcagtccttttttaaatctgatttttcagtaataaagcgattacatagaaaattcttgcactttttgatgtcttcttgaaatcaacagctatttaggatatatttttctatggataaaagggatattggaggccattaaatggataagcggtttgcagtgattttagctgccggaaaaggaacgagaatgaaatcgaagctttataaggtccttcatccggtatgcggaaagcctatggtagagcacgtcgcagacgaagctctgaaattatctttagcgaagcttgtcaccatcgtaggacacggcgccgaagatgtgaagaagcagctcggacagaaaagcgattacgctctccaagcagaacagctcggtacggctcatgcggtcaagcaggcaaaaccatttcttcacggagaaaagggtgtcacgatcgttatttgcggcgatacaccgcttctgacggcggagacgatggaagccatgctgaatgaacatacagacaaaggtgcaaaagccacggtgttaacggccgttgccgacgatcccgccggatacggaagaatcatccgcagtgaagacggcgccgttcaaaaaatcgtggagcacaaggatgcttcggagcaagaacgtcttgtgaaagaaatcaacacgggaacgtactgttttgataacgaggctctttttcgtgtcatcgaacaggtttcgaatgaaaatgcccaaggcgagtattatctgccggatgtgatcgaaatcctcaaagacgaaggcgaaactgttgccgcttaccagactggtaacttccaagagacgctcggagtgaatgatagagtcgctctttctcaggctgaaatgtatatgaaagagcgtattaacaaacggcatatgcagaacggagtcactttaatcgatccgatgaatacgtacatctcacctgacgcgcgtatcggacaagatacagttatttatcccggaactgtgttaaagggacaagctgaaatcggcgatgaatgtgtcatcggccctcacactgagatagaggacagttcaatcggcagccgcactgtgattaaacaatccgttgtcaaccgcagcaaagttgggaatgatgtaaatatcggtccttttgctcacatcagacccgattccgcaatcggcaatgaagtgaagatcggaaactttgttgaaatcaagaaaacacaattcggcgaccgaagcaaagcatctcatttaagctatatcggtgatgccgaagtgggcacggatgtgaatctgggctgcggctccatcacggtcaattatgatgggaagaaaaaatatttaaccaagattgaagacggcgcttttataggctgcaactccaatctggtcgctcctgtcacagtgggagaaggcgcgtatgtcgctgcgggttcaaccgtaactgaagatgtgccgggcgaagcgcttgccattgccagagcaagacaagtaaataaagaagattatgtgaaaaatattcataaaaaataatcctaaaatcggaggtttaccatgtctaacgaatacggagataagaatttaaagattttttctttgaattcaaatccagaacttgcaaaagaaatcgcggataatgtaggggttcaattaggaaagtgctctgttacaagattcagtgacggagaggtccagatcaacatagaagaaagtattcgcggctgtgattgctatatcattcagtctacaagtgcgccggttaatgagcacattatggaattgctgattatggttgacgctctaaagcgcgcttccgcgaaaacaatcaacattgtgattccgtactacggttatgcgcgccaggacagaaaagcaagatcacgtgaaccgattacggcaaaactttttgcaaacctgcttgaaacagcgggtgcgacacgcgtgattgcgcttgatttacacgcgccgcaaattcaaggtttctttgatattccgattgaccacttaatgggtgttccgattttaggccattactttgaaggtaaagacttgaaagatatcgttattgtttctcctgaccacggcggtgtgacgcgcgcccgcaaacttgcggaccgtctgaaagcgccgatcgcgattatcgacaaacgccgtcctagaccgaatgaggtagaagtgatgaacatcgtcggtaacgtggaaggaaaaacagcgattctgatcgatgatattattgatacggccggcacaatcacacttgccgctaacgcgctggttgaaaacggagctgcagaagtgtatgcatgctgtacgcaccctgtattgtcaggccctgccgttgagcggatcaataactctaaaatcaaggagcttgtcgtaacgaacagcattaagcttcctgatgagaaaaaaatcgaccgctttaagcagctttctgtcggaccgcttctggctgaagcgattatccgcgttcacgagaaacaatctgtcagctatttattcagctaaaccgaaactttaaggtttaaatcccagttattgtgggtattgttctaataggacgataaaacgataattaggatggtgctgaatatggcaactttaaaagcaaatgaaagaacagattttaaacgttcgacgcttcggaaaatccgtcattcaggacatgttccagggattatatacggtaaagaaataacgaatacgcctgtctctttagacagtgtcgaattgcttaaaacattgcgggacgaaggaaaaaacacgattatcacaattgatgtcaacggaaatcagcaatcggttatggtgactgatcttcagacagacccgctcaaaaacgaattgacgcacgccgattttcaagtcgtgaatatgagtgaggagctcgaggccgaggtgccgattcagctgacgggagaggcgaaaggagtcaaagacggaggcgttatccagcagccgctgcatgagctttcgatcaaggctaagccgaaggacatccctcagacaattaatgttgatatttccgggcttgaaatgaatgatgtgctgaccatcgcagatctgactgctgacggcaattatacatttacaaacgacccggaagaagtcgtggcttccatccttcctcctaagcaggaagcattcgaagaagatgcagaaccgtctcctgaggaagagcccgaaggagaaaatcaataagcgctttaagacgtaacccgcccgaggttacgtcttttgtgctagaatgagaagaattacagcgatgttgagggaggatttacgatgcttgtgattgccggtctcggtaacccgggaaaaacctatgagaacacgaggcataatgtcggctttatggccattgacgagctttctaaagaatggaatattgaactgaataaaacgaaattcaacggactttacggaatggggtttgtttccggaaaaaaagttctacttgttaaaccgcttacatatatgaatttatcaggagaatgtttgcggccgctgctggattattatgatgccgatcatgaagatctgaaagtcatatacgatgaccttgatcttccgacgggaaaaatcaggcttcggacgaaggggagcgcagggggacataacggaattaaatcgcttatacagcacctcggaacccctgaatttgaccgggtcagaatcggaatcggccgccccgttaacggaatgaaagtcgttgactatgtactgggagcttttacgaaggaagaagcgccgcatatcaatgatgccgtctcaaaaaccgtaaaagcctgcgaagcttccttaacgaaaccatttttagaagtcatgaacgaatttaatgcaaatgtataagataaataatgggagaccatactagggaaaaatgattttttcacatcaggaggtccaacgtatggctttgcattatttctgccgccactgcggctttaaggtagggagcctggaatattcaacggtgccgacacagtcacttggatttcagcacttaacaaatgaggaaagaaacgatatgatttcatataaagacaatggagatgtccatgttcttacaatttgtgaagactgccaagaggcgctggaacgcaatccgcactaccatgaacacaacacatttattcaataagaagctttggtgtagattctagaccaaagcgtttttctgttcttgcagaaaatagagaggagggcccatatggacaacattcaaacctttattaaagaaagcgatgattttaaatccattgtcaacggtttacatgaggggctgaaggaacagctgcttgcgggtctgtcaggttccgcgcgttctgtttttacctccgcccttgcacaggaaacgaaaaggccgattttctttatcacccataatttatatcaggcccaaaaagtgacggaagatctgacggcgcttctcggggatcaatctgtttttttataccccgtgaatgaattgatttcttcagaaattgcggtagcgagtcctgaactgcgcgctcagcggcttgatgtcattaatagattaacaaacggagaagcgccggtcgttgtggcgcccgttgcggcagtgagaagaatgcttccgccgaaggagctgtggaaaagcagccagctcgtcatttcactcggagacgatatagaaccggatcagctgtccgcgcgccttgtagaggtggggtatgagcgttccgatatggtttctgcacccggtgaattcagtattcgcggcggaattatcgacatttatccgctgacgtcggagcatccggtgcgaattgaactgtttgatacggaggtcgattccatcagaagcttcaattctgatgaccagagatcaatcgagacgctcaaacatgtggcgatcggaccggcgaaggaattgatcatcagggcggaagaaaaagcccgggcaatggaaaggctcgataaagggcttgccgacagtctgaaaaagctgaagcaggacaaacaaaaggaaatgcttcatatcaatatctcacatgataaagaacggttatcaacgggacagactgatcaggaacttgtgaagtatctctcgtacttttacgaaaaacctgctagtttgctagattatacaccggcagacacgttgttattgttagacgaggtcagccgcattcatgaaatggaggatcagctgcaaaaagaagaggccgaatttacgacaagtctgctcgaggaagggaaaattctgcatgacattcatttatccttcagctttcaggagcttatgagcgaaaagcggcgcccggctatttattattcattatttttgcgtcatgtccagcatacaagccctcagaatatcgtgaatgtgacaagccggcagatgcagagttttcacgggcagatgaatgtcctctcaggtgaaatggagcgctttaagaaatcaaacttcaccgtcgtctttttaggcgcaaataaggacagaaccgacagattggcatccgtgctggctgattacgaaattgaagccgcgaaaacggacagctccaaagcgcttgtgcaaggacaggtctatgtcatggaaggcgagctgcaatccggttttgaactgccgctgatgaagctggccgtcattacggaggaagagctgttcaaaaaccgaatcaagaaaaagccgagaaagcagaagctgacaaatgccgaacggatcaaaagctattccgagcttcaggtcggtgactatgtcgtccacgtcaaccacgggatcggtaagtacttggggatcgaaacactggaaatcaaaggcattcataaagattacctcaacattcattatcagggcagcgataagctgtatgtccctgtagaacaaatcgatcaggtgcagaagtatgtcggctctgaaggaaaagaaccgaagctttataaactgggcggcagtgaatggaaacgggtgaagaaaaaagttgaaaactccgttcaggatattgccgatgatctgattaagctttatgcggaacgggaagcaagcaaaggctatgcgttctcgcccgatcatgaaatgcagcggcagttcgaatctgctttcccttaccaggaaacagaggaccagctccgttccattcaggagattaaaaaggatatggaaagagaacgcccgatggaccgtttgctttgcggcgatgtgggttacgggaagacggaggtagccatccgagcggcctttaaagcgatcgcagacggaaagcaggtcgcgcttcttgtgccgacgacaatactcgcgcagcagcattatgaaaccattacggagcgttttcaggactatccgattaacatcggtcttctcagccgattcagaacgagaaaagaatccaatgaaacgattaaaggactgaaaaacggaacggtagacatcgtaatcggaacccacaggctcttatctaaagacgtcgtctataaagatctcggcttgctcatcattgatgaagagcagcgcttcggcgtaacgcataaggaaaaaatcaaacagatcaaagccaatgtcgatgtactgactcttacagcgacgccgattccgcgtacgcttcatatgtccatgctcggtgtgcgggatttatccgttattgaaacgccgccggaaaaccgtttccctgttcagacatatgtcgtggaatacaacggcgcgcttgtacgagaagctatcgaaagagaactggcgcgcggaggacaggtatatttcctgtacaaccgcgtggatgacatcgagcggaaggctgatgaaatttccatgcttgttcccgatgcaaaagtggcatatgcccacggaaaaatgaccgaaaatgaattggaaagcgtcatgctcaattttctggaaggggaatcagacgtccttgtcagcacgactattattgagacaggcgtagatataccaaatgtcaataccttgattgtgttcgacggagacaaaatggggctgtctcagctgtatcagctgagaggacgggtcggccgttccaaccgcgtcgcttacgcttattttacgtaccgcagagacaaagtgcttactgaggtggcggaaaaacggctgcaggcgattaaagaatttaccgagctgggatcaggctttaaaatcgccatgcgtgacttgacgatcaggggagcggggaaccttctcggcgcccagcagcacggctttatcgactcagtcggttttgacctgtactcgcaaatgctcaaggaagcgattgaagagcggaaaggcgatattccgaaaagcgaacagtttgagacagaaatcgatatcgagcttgacgcgtatattcctgaaaactatatacaagacggcaagcaaaaaatcgacatgtataaacgcttcagatcaatcgccacaattgaggagaaaaatgagctccaagatgaaatcatcgacaggttcggcagctatcctaaagaagttgaatggctgtttacggttgctgagatgaaggtatacggaaaatatgaacgcgtcgaactcatcaagcaggataaagacgcgatcagatttaccatttctgaagaggccagcgcacagattgacggccagaaattattcgaactcggcaataaatacggccggcagatcggactgggaatggaagggaaaaagctgaaaatctcagtacagacgaaaggccgcaaaacggaagagtggctggagaccgtgctcggcatgctgaaaggccttcagaatgtgaagaaagaaacaatcgcgtcttcataaaaattgttactctctggtgtatattacatttgatgtgacggatactaatttcaagcgagtggcggaagctacataaagtaaagagctttagtactttcccttaaatatcatcacatgaaagagaggcaccagagagatgaaagctacaggtatcgtacgtcgtattgatgatctaggacgggtcgtcattcctaaagaaattcggagaacactgcgaatcagggaaggagacccgcttgaaatattcgttgaccgcgacggagaagttatattgaaaaaatattctcctatcagtgagcttggcgattttgcgaaagaatatgcagatgcattgtatgacagtctcggccattccgtcttgatttgcgaccgtgacgcgtatattgccgtttcgggcagttcgaaaaaagaatttctgaataaagccatcagcgatttgctcgaaaaaacgatggatcagcgcagctcagtggtagaaaacgacgtgaagtccgcgcagcttgtgaatgacattgatgaagatatgagctcctatacaatcgctccgatcgtggcaaatggcgatcctatcggtgccgtggtcatcttttccaaggaacaggcgcttggagaagtagaacataaagcggtagaaacggcagccagttttttggcgagacaaatggagcagtaggtcttattaccattattgaaataagaaaacggggaaagaacagctcttatacaagtgctgttctttttcatattcatatgtgctctctatcggttcggccgttaggattgtgatataataagctcgttttatagacgtaattttctagcggctggaaggagcttttggatgaacgattcagttggcgccaagcggcaatcggcatggaaaggtgcttttgtgctcgtcgttgcgggcatcgtgacgaagatattaagcgccgtgtacagggttccttttcagaatattgtcggtgacgtcggattttacatttatcagcaggtgtatccgtttttagggatcgcggtcatgctgtcaacatccggttttccggtgatcatctcaaaattaatgaacgattatagcgatcataaacaaaaaataatgaaaatttccgccctttatgtcacggcggccggacttgttctgtttgcgctcatgtatgccggcgcggcgccgttggccggttttatgggtgatgcccgccttgtgatgctgataagggtcgcggcgttcgctttcatactgtttccgtttacggcggttttccgggggtatttccaaggcgtgcatgatatgatgccgtcagccttatcccagattacggaacagcttcttcgggtggcggtgcttctcggtttatccttctggcttttgaaaagcgggcgttcattatacgcggcgggtgcgggggcggcctcgggatcaattgccgggagctttgcggccctttgtgtattggctgttttctggtataagcgggaagaaacaaagaaagacggcggacatatcgaaacggccgtcattgtaaaaaagctgctgctttattcagtcaccatctgtatcagcagtgtactcatgcttttgattcagcttgtagacgccttaaacttatattcactgctttcagacgggacggagagccatgccgcgaaacagctgaaaggcatatatgaccgcggacagccgctccttcagctgggaaccgtgtttgccgtcagtatcgccgcgtccttggttccttcaatttcaaaagcggtgcatgagaacaagccgtttatcataaaagagaaagcgtcatctgccgtcaagctctgccttgcggtagggatcggtgcatcagccgggcttttttgcattttagaaccggtgaatatcatgcttttccaaaacagtgaggggacgccgaccttacaaatattcagcttatctatcttttttgcctcgattgcgcttacggcagccgcaattctgcaaggagcgggacataccgttttccccgccgtatccgttttggcgggaggggcgctgaaatgggtgctgaatgtttggctggtccccggctggggtattacaggagcggcactggcgaccgtcttggcatttgccgcagttgcgtgcctgaatctccggagaatttggtcgaagggatggctgacgaatatcggaggcgtgattgcccgtctgtgctggtgcagtctgctgatggtcttctttttggtcgtatacatgaagctttggcagttatttgttcctgtcagcagggcggagctgtatgtgagagtctgtctgcgtcaatcatcggagggctattgtttatttattgtatgataagaatgaagattttcacggacgaagagctgagcggtcttcctttcggcagtgctttaagcaaattgaaaaagaggagagaaaaacatggcaggtaatattacggtcgtcggcctcggcgccggagacatggatcagttgacagtgggcgtacataagctgctgactcaggcgaagcatttatatataagaacgaaagaccaccctttgatttcggaattagagcaagagacggaagcggacatccggtattttgatgatatttatgaaaaacatgatcagtttgaagcggtctatgaagagatcgcggacattctgtttgaaaaagcgaagcaagaggatgtcgtctacgctgtacccgggcatccgtttgtcgctgagaaaaccgttcagctgttatttgaacgccgggaagaacaacagatagatgttcataccgctggagggcaaagctttctggatgccacttttaatgcgttgcgaattgatccgattgaagggtttcaatttacggatgcgcaaacaatgacgccggatgagctcgaactccggcatcacctgatcatctgccaggtttatgaccaaatgacggcctctgaggtgaagctgacgctcatggagaaattgcctgacgactatgaagtggtcatcgttacagcagccgggagcaagggagaaaagatgatcaaggtgcctttgtttgaacttgaccgcaatgtagaaataaataacttaacaagcgtgtatgttccgccgattaaaaaagaagaactcctttaccaggaattttctgcattccgaagtattattcgcgagcttcgcgggccgaacggctgtccgtgggatcaaaagcagacacaccagtcattaaagaaatatatgattgaggaatgctacgaactgcttgaggccattgacgaagaggacacggatcacatgatagaagaactcggggacgtcatgcttcaggttatgctgcacgcccagatcggagaagacgaggggtatttctcaattgatgatgtcatcagagacatcagtgcgaagatggtcagacggcacccgcatgtgtttaaggatgttaaggttcaggatgaacatgatgtcgtcgccaactgggaagaaatcaaaaaggcggaaaagcaaacaacatcctcttcattgctggatgccgtgccgaaaacactgccttctcttgcgaaagccgccaagcttcagaaaaaagccgcaaaaaccggctttgactgggataacgttcaggacatatgggataaagtaaatgaagagctgaaggaattttctgcagaggcttccgccgaatcagcagatgaaatcagcttaaaagctgaattcggcgatgttttatttgcattggtcaatatcggccgatactataaaattgagcctgaggaagcgctcgccatgacaaatgacaaattccgcagacgctttgcttatattgagaaagaagcggcagcaaagggccttgaattgaccgcaatgtcacttgaggaaatggacaaattgtgggatgaagcaaaagaaatggagaggagattctgatatgagacttgataaatttttaaaagtatccagattaattaagcgacgcacattggcgaaagaggtcgccgatcaagggagaatcaccgttaacgggaatcaggcgaaagccagctcagacgtaaaagccggtgatgaactgaaggtccgcttcgggcagaagcttgtcaccgtgaaggtaaatgaattgaaagaaacaacgaaaaaagaagaagccgcgggcatgtatacaatcgtcaaagaagaaaaactcggcgaataggcttgttctaaacaaggctcccgcctcatacaatgcagtaataatgctaaaagtatcgaggatatgggggctgaatagatgaattcatattatgagcaaaaaggttcttcttctgttccggaacagcatgatgtaacgatgaaagggagaaagcatttagacatttcgggcgtcaagcatgtggaaagttttgataacgaagagtttttgctggaaacggttatgggaatgctttccgtcagaggcgagaatctgcagatgaaaaaccttgatgtggaaaaagggattgtatctataaaaggcagggtgtttgaccttgtatatttagacgagcagcaaggggataaagctaaagggttttttagcaagttgtttaaatgacgctgacgacccaattttatacgatgctggcaatgaccggtatgggcgcctggctcggagcgtcgcttgatacatacaggctgtttgtcagccgcgccaaaacggccagatggctgttattcattcatgacattctcttttggattgtacaaggtctgctgtttttctatgtgctgctcaacgtgaatgaaggggaactcagggtatacattttcttggctgtcttactgggtattgcgacgtaccaaagcctgtttaaacgaatgtatataaaaatactgaaatttgccattcatcttgcggtgtctctttaccaattcgcaaaaaagctcattcagcacgtgctgttccgtccggtgcttctgctctttaagctgctcatcgggctgatcacggttatttctttatactcctatcgggtgagtgccttttttgcgaagtgtctttttaagatcgtagcgtttttgctgtatccgctgtttttcctgttgaaacaattattgaaacttcttcctgaaaagtggcgtcttactttcaaacgatattttcaaaaaagtgcaggatttttacaaaagagcaagaaactaatcataacaatcagatcgaccatgatacgtattttgaaaaggtgaaaggaggaccgtctggtttgaatctatctagggaacgtacaataactgaaattcaaaacgactataaagagcaggttgaacggcaatcccagcttatgaaaagaaggcggaaagggcttttcagacggttgatcgtattcggcgcccttgtgttgttgacggctattgtcttagcgggttctctgtggtcacagacctcttcccttagcgcaaacgaagaaaaaaaggctcagctggaaaaacaagttaaagaattgaatgcgaaacaggctgatttaaaagatgaaatttccaaattaaaggatgaggattacgtcacagagcttgccagaagagacttgtttatgtcaggaaatggtgagattctctttaatgtagaaaagaagagcaagtagccttgttgacacttaaatttttatttaggtataattaaacaaacgatctttttataagcctaaggaggagcactttttttatgtcgattgaagttggcagcaagttgcaagggaaaataacaggtattacaaatttcggagcatttgttgaattgcctggaggctcaaccggtctcgttcatatcagtgaggtagccgataattatgtaaaagacattaacgagcatttaaaagtcggcgatcaagttgaagtgaaagtcatcaacgttgaaaaagacgggaaaattggtttatcaattaaaaaagctaaagaccgtccgcaagccagacctagaaatgatttccgtccgaaagaatcttttgaacagaaaatgaacaagtttcttaaagatagcgaagaccgcttatcatctttaaaacgaaacacggaatcaaaacgtggagggcgcggagcaagaagaggataacttgctgctttctataaatacatggagcatccgtctatcccagcgggtgctttttttgtatacgcgcatgtagtcagaaaattaaaactttaaagtttctgttgacggaatgaagaaacctttgtattatataacttgtgcttataagcacctatatggcggtgtagctcagctggctagagcgtacggttcatacccgtgaggtcgggggttcgatcccctccgccgctaccatatatatctggcccgttggtcaagcggttaagacaccgccctttcacggcggtaacacgggttcgaatcccgtacgggtcatcaagcgaatcggcttctgttgcagaagccgattttttcatatttagacaactttttgagaaatgtcggaggaaatacaaaaggaaaggggaacaagggagaaagcgtcgaagagttctttggaattgttaccttcttttgacaaaatcctatctgggctttcatttataatgacaagcaacgaataaaacaggtgggggatgagagcaatggaaaaagcggaaagaagagtgaacgggccgatggcgggacaagctctggaaaaactgcaatcgttttttgaaaaggcggcaaagcttacagtccatcaagcgcattcactttttttctataagggtttcatttatgtcgtgatcggttttttacttggacgggctttcatattatctgaggttcttccatttgcactgccgtttttcggagcgatgcttttgatcagaagagataaagccttctatgcttgtctgtctttacttgcgggcgctttaaccatttcgccgaaacactctttattgattctcacagctttggccgtcttcactctattttcaaaaatcggtacatatatcgtgcaggaccgggtgaagatgctgccgatcgtggtgtttttctctatggctgccgcgagaatcggatttgtttattttgaaagcggcgcttttaccacctatgattatgtgatggctgttgtcgaggcgggcctggcctttattttgacgctgatctttttacaaagcctgccgattttcacgatcaaaaaagtgaagcaatcgttaaaaatagaagaaatcatctgttttatgatcttgatcgcatccgttttaaccgggcttgccggtgtttcatttcagggaatgcaggctgaacatatcctggcccgctatgtcgtgctgagtttttcctttgtcggcggggcaagcatcggctgtacggtcggtgttgtgaccggactgatcctcgggcttgcgaatatcgggaatctctatcaaatgagtctgcttgcgttttccgggcttcttggcgggctgctgaaagaaggaaagaaagccggcgccgcagtcggattggtgatcggctcactgctgatttcattatatggtgaagggtctgccggattaatgaccactctttatgaatctttgattgccgttgtattgtttttgattacgccccaatcgattacgaaaaaggtggcgcgatacataccgggcactgctgagcacagtcaggagcagcagcagtacgcgaggaaaatcagagatgtcaccgcccagaaagtagaccagttctccaatgtgtttcatgccttgtcggagagcttcgccacctttcatcagacgtcttccgatgagcaggcggaagaaggggaagtggatctctttttaagcaaaatcaccgagcattcctgccaatcctgctataaaaaaagcaaatgctgggttcaaaactttgataaaacatatgacttaatgaaacaagttatgcatgaaacagaagaaaagcagtatgcctcaaaccgcagattgaaaaaagagtttcaacagcactgttccaaatccagacaggtggaagagctgattgaggacgaacttgcccaccatcacgcccatctgacactgaagagaaaagttcaggacagcaggaggcttgttgccgagcagctgttgggggtttctgaggttatggcggacttttctcgggaaataaaacgggagagggagcagcattttattcaggaagaacaaatgatagaggcgcttcagcatttcggaatcgagattcagcatgtcgagatatacagcttggagcagggcaatattgatatcgaaatgacaatcccgttcagcggaggacacggcgagagtgagaaaattatcgccccgatgctgtctgacattcttgaggagcagatacttgtcaaaagcgaacagcactcggctcatccgaatggctacagccatgttgcgttcggttcgaccaaatcgtaccgggtatcgacaggcgcggctcatgcggcaaaaggcggcggccttgtctccggcgacagctacagcatgatggaactgggggcgagaaaatatgcggccgcaatcagtgacggcatgggcaatggggcgagggctcattatgagagcaacgaaacgattaagctgctcgaaaaaattctcgaatcaggtattgatgaaaaaatagcgatcaaaacgatcaacagtattctgtctttacggacgacagacgaaatctactcaactctcgatctttctatcattgatcttcaggatgcaagctgcaaattcttaaaggtcggttcaacgccgagttttatcaagcggggagatcaagtcatgaaagtgcaggccagcaatctgccgatcggtatcatcaatgaatttgatgtggaggttgtaagtgaacagttaaaagcgggagatctgctcgtcatgatgagtgacggtatttttgaaggaccgaagcacgttgaaaaccacgacctgtggatgaaacggaaaatgaaagggctgaaaaccgaagatccgcaggaaatcgctgatatattaatggaagaggtcatcagaacgcgttccggccaaatcgaagacgatatgacggtggttgttgtccggattgatcacaacacgccgaaatgggcttccataccggtgccggcggtattccaaaataaaaaggagatttcttaatcctttcgtataaatcactttccttctggcgaagatgggactaatcgtatcaccgggaggaatgtatgtgaataagggacatttaaatcaagttctgctgattacagatggctgctccaatcatggtgaagacccgattgcaatggcggctttcgccaaggagcaggggattacggtgaatgttatagggattatggaagaaaacgcgattgaccaagaggcaatgaaggaagttgaaggcatcgccatggccggtggcggcgtccatcaagttgtatatgcgtcacaattgtctcagacggttcaaatggtgacgaaaaaagcaatgacccagacgctgcaaggtgtcgtcaatcaagagcttaaacaaatcttagggaaaaacgttgaaatggaagagctttctccggaaaaacgcggcgaagtgatggaagtggttgatgaactcggagaaacagttcatctgcaggtgcttgtgctggttgatacgagtgcgagtatggcgccgaaactgccgacggtgaaagaagcgctgattgatctttccatcagtttaaattcccgggccggacaaaatgaatttgccatgtgtatatttcccgggaaaagccaggaagttgagcttgtgctgaattggacgccgaagcttgaatccctttctgcgctctttgcgaagctgtcgaccggcggtatcacccctacgggccccgctatccgggaagcgacgcagcagtttgagagaatccgctcaagaaggagcatgttggcagatgatgaacgacgctttaacgagtttggcatgtagtctggcaccggggacggcaattcagggcaaatggaacggcaaatcctacagattgctcaaacagcttggaaaaggggctaacggtattgtatatctggcagaagcatcaggcggacaggtcgctttgaaaataagcagcgacagcatgtctgttacctctgaagtgaatgtcttaaaatccttttcaaaggcccggtcgcaaacgatggggccttctttttttgatgcggacgatgcgtttattccgcagctgaataaaaatgtctctttttacgtgatggagtacatagaagggccgcttcttccgcaatatatcagcagtaagggagcggagtggattccggtgctgatggtgcagcttctttccagcttgtcagtccttcatcagcagggatgggtttttggcgacctcaaaccggaaaatcttattgtaaccggaccgccggctgccatccgctgcattgatgtagggggaacgacaaaacaaggccgcgcgattaaagagtatacggagttttacgacaggggctattgggggtatggaacaagaaaagcagaaccatcctatgacctgtttgctgtcgcaatgatcatgatccactgtgtccagaagaaagagtgcaaaaagtcaggacagccgaaagaacagcttcgttctatcattgaaggccacccgtttctgaataagtataagaaggttctgttttctgctttaaacggccaatatccgtctgcggaagccatgaagcatgacatcctgacggcggggcagagcgccgggagtaaaaggaaagccgccgccaagcctaagccgccgcaatcaaaaccgcggcagggcactgtatctcaaacgcggtataaacctaaacaaaaacccgcaaagcacaatggtttgtttgaaacaacgcttattttaatcagcgttctcgccctttatttcgcttacatcgtcttttttctcatctaatgccggccggacgcctgcgctcatgcttcttctttgcttggagggaatgaaagtgataggatatgtatatctttaaaaaaacctgctcattgtgaggggacattgtgaaaagcgtggaagattttttcaaaacatatcatcttcaggcggagggagaaacgattattgccggggtctccggaggccctgattcaatggcgcttctcagtatgctgaataagcacttcgggcattcttccgttatcatagcggcgcatgtcgaccatcagttcaggggtcctgaatctgaagaagatatgaagtttgtgcagtcatattgcgaagcggaacacatcctctgcgaaacggtacagattgatgtttctgcatacgcaaagaagaataagctgaacaagcaggctgccgcgcgtgattgcagatatcagtttttcgaagatctgatgacaaaacaccaagcgaagtttttggcgctggctcatcacggcgatgaccaggttgagacaatgctcatgaggcttgcgaaaggtacgctcggcgcagggctcgcgggaatgcagcccgtccgcgaatttgcatccggctggctgatcaggcctttcctctatgcggaaaaggatgaaatcctagaatactgccgtcaagaagggctcagctacagaacggatgagagcaatgcaaaagacgattatacaagaaacagattcagaaagaccgtgcttccttttttaaaacaagaatcacctgacgttcataaaatgtttcaaaaggtgagtgaagcactgacagaagacgaacaatacttgcagtcattaacgaaagaacgaatgaataaggttattacaagcaagtctgacacatcggttgaagtcgattcctctcaattgcttgcccttccgatacctttacaaagaagaggagttcaactaatattaaactatctttatgaaaacgttccatcgtcgttttccgcccgccacatacagcagtttctggaatgggcggaaaatggaagcgcctcgggagtgcttgattttccgaaagggctgaaggtggtcaaatcatatcagacatgtttgtttacatttgaacaatggcaatgtgaaaaggttccctttgagctgcagctgcaaggagcggaaggcgagactgctgttctccccaacggctttatgatagaggtggccgatcaggctgaccctcatatcaaaaatgggaatgctgtttttatgacaagcagaaataaggtgcaatttcctttaacaatccggacgagaaaaatcggcgaccggattaaacttaaagggatgaatggctcgaaaaaggtaaaagatatatttattgatcataaactgcctctgcgggatcgggacgaatggccgattgtaacggatgcgagcggtgaaattatctggctgcctggcttgaaaaaatccatctttgacgatcttgtgatttcaaacagtgaccgcattgtattacaatatagacagcatgaaaagtgtagggggcaagcattaacatgaaacaggatatcgaaaaagtgctgatctcagaagatgagatccagcagaaagtaaaacagcttggagaacaattaacaagcgagtacagcgacacgtttccgttggcaatcggtgtgttaaagggagcgcttccttttatggctgatcttataaagcatattgatacatatttggaaatggacttcatggatgtatcaagctacggaaattccacggtttcttccggagaagtcaaaatcatcaaagatttggatacatctgtagaaggccgggacatcttaatcattgaagatattatcgacagtgggttaaccttgagctatctcgtagaactcttccgatatcgtaaagcgaaatcaattaagattgttaccctgttggataaaccaagcggaagaaaagcggacattaaagcagacttcgtaggctttgaagttcctgacgcgtttgttgtgggttacggacttgattatgccgagcgctatcgcaatctgccttacatcggagtattaaaaccggcgatttatgaaagctgatcggctgcctgcttccgagatggttatcggttgtattggaatgattttctatggtactattgaacatagttgtgcttactgtgggaggaggtaaggaatgaatcgggtcttccgtaataccattttttatttacttattttattagtagtaatcggggttgtgagttacttccagacctcaaacccgaaaacagaaaatatgtcgtacagtacgtttatcaagaacctcgatgaagggaaagttgatagcgtatcggttcagcctgtcagaggtgtttatgaggtaaaaggacagctgaaaaaatacgacaaagaccagtactttttaacacatgttcctgaaggaaaaggagcagaccagatatttgacgcaattaaaaagacggacgtaaaagttgatcccgcacaggaaacaagcgggtgggtgacgttcttaacgacgatcattccgtttgtcatcatctttattctgtttttcttcctgctcaatcaggctcagggcggcggcagccgtgtcatgaacttcggaaagagcaaagcgaagctgtatacggaagaaaagaaacgcgtgaagtttaaagatgtagccggcgcggatgaggagaagcaggagctcgttgaggttgttgagtttctgaaagatccccgcaaattcgccgagcttggcgccaggatccctaaaggcgtgctgcttgtcggacctccgggaaccggtaagacattgcttgcgagagcctcagccggtgaagctggcgttcctttcttcagcatcagcggatctgacttcgttgaaatgtttgtcggtgtcggtgcttcccgtgtgcgtgatttattcgaaaatgcgaaaaagaatgcgccttgcctgatcttcattgatgagatcgacgcggtaggacgtcagcgcggcgccggtcttggcggcgggcatgatgaacgcgaacagacgctgaaccagctgcttgttgagatggacggtttcagtgcgaatgaaggaatcattattatcgctgcgacaaaccgtgcggacattcttgaccctgcattgctccgtccgggacgttttgaccgtcagattacggtagaccgtccggatgtcatcggccgtgaagccgtattgcaggtgcatgcgagaaacaaaccgcttgatgagacggtgaacttaaaagcaatcgcttcaagaacacccggtttctcaggcgcagatttagaaaaccttcttaacgaagcggcactcgttgctgcccgtcaaaacaagaagaaaattgatatgcgcgacattgatgaagcaacggaccgtgtcattgcgggtcctgcgaagaagagccgcgtcatctcgaaaaaagaacgcaatatcgtggcgtaccacgagggcggtcacaccgttatcggacttgtgctggatgaagccgatatggttcataaagtaacgattgttccgaggggcaggcaggcggatacgcagtcatgcttccgagagaagaccgttacttccagacaaaacctgaacttctcgataaaattgtcggtcttctgggcggacgtgttgccgaggaaattatcttcggcgaagtcagcacgggggctcacaatgacttccagcgggcaacgaacattgccagaagaatggtgacagagttcggtatgtcagaaaaactcggaccgcttcagttcggtcaatctcaaggcggtcaagtattcctgggccgggatttcaacaacgagcaaaactacagtgatcagatcgcttacgaaattgatcaggaaattcagcgcatcattaaagaatgttatgagcgtgcgaaaaccatcctgactgaaaatcgcgataagcttgaattgattgctcagacattgcttgatgtggaaacattagatgcggaacaaatcaagcatctcgtggatcacggaaaactccctgagcgcaatttctcagatgaccatcttcaaaaagacgatgtgaaagtaaacatcctgtctaaaacagaagacgaaaagaaagacgagccgaaagaatagttcgctttctgatatgaaaaccgccggcgtataccggcggtttttttactggttccgttttgtttacaaaagagccgcagatcgtgtatggtattgtagaatgttgaaaatgttatgattagaaactattcaaaagtggtgatagaggttgttactggttatagatgtggggaacaccaacaccgtgattggtgtatatcatgatggggaattagaatatcattggcgcatagaaacgagcaggcacaaaacagaagacgaattcggcatgctgctccgctccttatttgaacattccggactgatgtttgaacagattgaagggattatcatctcatccgtagtgccgccgattatgttctctttagaaagaatgtgcacaaaatactttcacatcgagccgcaggttgtcggcccgggaatgaaaacaggtttaaatataaaatatgacaatccgaaagaagtgggagctgacaggatcgtcaatgccgttgcagcgatccagcagtatggcggccccttaattgttgttgatttcggaacggcgacgacgtattgctacattgatgaaaacaaacaatacatgggcggtgcgattgctcccggcattacaatttcaacggaagcgctgtactcacgcgcggccaagcttccgagaattgaaatcgcccgaccggataatatcatcggcaaaaacacggtaagcgccatgcagtccggcatccttttcggctatgtcggacaagttgaaggcattgtaaagcggatgaaatggcaggccaaacaagaaccgaaagtcattgcgacaggggggcttgcgtcattaatcgcaaacgaatcagactgtattgatattgttgacccgtttcttactttaaaagggctggaaatcatttatgagcgaaatcgcgtgggtcacatataggaggtaaacgatggattatttaattaaagcaattgcatatgacggtaaagtgcgggcttatgcagccagaacgacagatatggtaaatgaagcgcaaagaaggcatgacacgtggccgacggcatcagccgcaatcggccggacgatgacagcgtctctgatgctcggagcgatgcttaagggtgaagataagctgacagtcaaaatagaaggcggcggcccgatcggagccattgtcgcagatgcgaacgcaaagggtgaggtaagagcatacgtatcaaacccgcacgttcattttgacctcaatgaacaagggaaactggatgtcagacgggcggtcggaactgacggaacactcagtgtcgtaaaagatttgggcttgcgtgattattttacggggcaagtagagattgtctcgggtgaactcggtgatgacttcacgtattaccttgtttcttctgaacaagtcccttcatctgtcggggtaggtgtactagtaaatcctgataacacgattctcgctgcgggcgggttcatcattcagcttcttccggggactgatgaagaaaccatttcaacaattgaaaagcaattatctcaaatcgaaccgatttcaaaattgattcaaaaaggcctgacaccggaagaaatcttagaagaagttctgggtcaaaaaccggacgttctcgaaacaatgccggtcaaatttcactgttcttgttcaaaagatcgattcgaaacggccattttaggactaggcaaaaaagaaatacaagatatgatagaagaagacggaaaagccgaagcggtttgccatttttgtaatgagaaatatttatttacaaaagaagaactggaagagcttcgtgacgaaacaacccgctagctctttagcgggttgttctattttgtaaaagggatggggtagattttgaaatcgagaacacttttgacgattattgtagcggcgctgttggtatgcagtgtagcagtggcgtataagttaacaaaatcccaagccgcggggtcatctgaagaatccatcgcgacaatcggtgataaacatatcacacggcaggactggatgaaaaagatggaagacgagtacggaaaatcaactctggaggatatgattaatgcacaagtagtggaagaacttgcgaaaaagaataaactcacagtttcaaacaccgaattggaacgtgaatttcttttaatcaaagcggtgaataattcattttatgaagacagccatattaccgaaaaagaatggagagaccagatccgctacaacattcttcttgaagaactgctgacgaaggacatcgatatatcggataaggaaatgcaatcattttataataaaaataaagaactgtaccatttcgatgattcctacagaatcaggcacattgtcgtcaaaaacaaggaagaggcggacagggtgcttgctgatttgaaaggcggttccagctttgaagccgtcgccgctgagcgttccacggacagatacacgtctcagtatggcggagacctcggctttgtgacagaaaaccaggaaaatatcccgcaggcatatatcacagaagctaaaaatctcaaagaagatgaatggtccgctgaaccgattaaagtttcttcaggatatgccgtcattcagctgaaagaaaagcttaaagcgagaactttctcatacaatgaagtgaagagtcaaatcagacgccagatcgcgatggatcaattaggtgacaaggcgacagtcaaaacgctgtggaaagaggcgggggtctcttggttctacggggaaaaaagaactaaatgattgacaaaaaattttgaaattgataacttatatttataataccaataaatttagtcggaaattgaggtgtccaacatggtgcgtattgcaaattctattactgaactaatcggaaatactcctattgtgaaattgaatcgcctgacggatgaaaacagtgcagatgtatatctgaagcttgaatacatgaatccgggcagcagcgtaaaagaccgtatcggagcggcgatgattgaagcggctgaaaaagaaggaaaattaaaagccggcgacacaatcattgaaccgacaagcggaaatacaggaatcggtcttgcgatggtggcagcggctaaaggtctcagagccattctcgttatgcctgatacaatgagtatggaacgacgcaatctgctgcgcgcatacggagcggagcttgtgctgactcccggcgcagaaggaatgaagggcgccattaaaaaggcggaagaacttgcggaggaacacggatactttgtgcctcagcaattcaacaatgcggcaaacccggaaattcaccgccaaacgacggggaaagaaatcgtagaacagtttggtgacgaccagcttgatgcgttcgtggccggaatcggtaccggcggaaccatcacgggagcgggcgaagtgctgaaaaaagcatatccatccatcaaaatctatgcggtagagccggcggattctccagttctttccggcggaaaaccgggtccgcataaaattcagggtatcggagcgggatttgtccctgaaacattgaatacggacatctatgatcaaatcattcccgtcaaaaacgaggatgcatttgaatatgcccgtaaaacggcaaaagaagaagggattctcggcggtatttcttccggagcggccatttacgcggcactggaaatcgcgaaaaaactcgggaaaggcaagaaagtgcttgcgatcatccctagtaacggagaacgttacttaagcacaccgctttatcagtttgaatagagacatacacacggctcccggctgtatccgggagtttttttgtgcctgaagtatcgaaaatccaaaaaacgtttcgaattttatggttggaagtgaaattcacttttttcaccagtgtgattgctttaaaataaaactacagtaaaacgaagcagaggattgatatgatggcacaacgcagaccggcaggaagaaaaataccttttacgaaacaagcatttttacagcgatatgaaaacctttcgaaatcgagaaaacggcatgttctgctcgaaagcgcgagagggggaagattcagtatagccggtctagatccgattgcgtccgtcagagggaaagacggaattacaacgatcaagcatgagggagaaacactgtttaaagaaggtgacccgctgcgggcctttcatgaatggtttggaacgctcggaacggaaacaaacgttgagtttccggactttcagggcggtgcgattggttttatcagttacgactatgcccgatatattgagaattttaagatgctgtcgttagatgatctggaaacacctgatatttactttcttgtttttgatgatgtggccgtttatgaccatgaggaagaggcgttatggctcattacccatactgaagcggaagaagcggatcttgcggaagaaaagctgtccggcttagaggacatgtggtgttccctccaaacggcggacgagcctttttcaccgctgaatcggaatggggacggatcgtacgccgctccgttcaccgaggaaggattttcacaggctgtagaacaaattaaacaatatatcgcgagcggggatgtgttccaggttaatttgtccatcaggcagtctcagtctttatccgttcatccgtatgaggtgtataaacacttgcgaaacgtcaatccgtctccttacatggcctatctcgagacaccggggtttcaagtgatatgcgggtcgccggagctattggtgacaaagaaggggaagaagcttgaaacgagaccgatcgcgggtacgcgttcaagaggaaaagacgatgctgaagacaaggctttggctgatgaattaattcacaacgaaaaagaacgtgcggaacacgtcatgcttgttgatcttgagcgtaatgacctcgggcgcgtatcgcgctacggctccgtgcgggttaacgagtttatggcgatcgaaaaatattcccacgtcatgcatatcgtgtcaaacgtacagggagagctgcaggacggatatgacgcgacagacattattcatgcggtgttcccgggggcaccatcacgggagcgcccaaagtgagaacgatggaaattatagaagagcttgagccgacaagacgggggctttatactggatctataggctggttcggattcaacggagatttgcagtttaacattgtgatccggacgatctatgcagccggcggacatgcttttatgcagtccggagcaggagtggttattgattcggttccgaagcatgaatacaaggaatcgttcaaaaaagcttttgcgatgaaaaaggcgttagagctgagcgaagaagagacaaaaaatcagacgaggtgagcagagatgattttaatgattgacaattatgattcatttacgtacaacttggttcaatatttgggtgagctcggggaggaactgatcgtcagacggaatgacgagattacgattgagcagattgaagagctgggtccggacttcttaatgatttctcccgggccgtgcagtcctgatgaagcggggatcagcctcgaagccatcaaacattttgccggcagtattcctattttcggcgtatgtctcgggcatcagtcgattgcgcaagtattcggcggcgatgtcgtcagagcagagcggctcatgcacggcaaaacgtcagaagttatgcatgacggacagacgatttttaacggcctgcaaaatccgctggtcgccacccggtaccattcacttattgtcaaagcggacacgctgccggattgttttacggtatccgctcaaaccaaagaaggagaaattatggccatccgccataatgagctgcctgttgaaggtgttcagttccatccggaatccatcatgacctccttcggcaaagagatgctcagaaactttatagagacacaccgcaaaaaggaagtatcggtgtgattatatatttgaatggtcaatatatagaggagaaagaagcggcgctttctccttttgaccatggttatctgtacgggatcggagcgttcgagacgttcaggctttacagcggccggccgtttctgccggatgcgcatgtcgccaggctcaacagggcgcttcgggatctgcagattgcattcgaggtgaacaaacaggagctgcttgatatgcttcggagactgttgcttctcaatgacataaaggacggcagcgcgcgtgtccggcttaacatctcggcaggcgtcagcgataagggatttgccgcgcagacttatgaaaagccgaccgtcctttgtttcgtgaaccggctcaatccggaaactctgcctgttcaaaaagaaggcaggcttctctctgtccggagaaatacgcctgaaggatctttccggttaaaatcccatcactatttaaacaacatgtacgctaaacgggagatcgggaatgatcccaatcttgaagggattttcctgaccggagaaggagatgtcgcggaaggcattgtctccaacgtgttttggcgaaaaggagacaaggtctttacgccatctttggatacgggaattctcgacggtgtaacaagacagtttgtcattgatgaattgaaacggcaggggacagaagtcaccgaaggccgattccgttttcaatcaatgcttgaagcggatgaagcatggttgacaaactccgtgcttgaaatcatcccgttttctaaaatagaggaagtgccgctgcccggaatgagcgggaaaacggtgcaattgctccgtaagcagtatcggcaggaaataaacaaaatgaatgtacaggaggaggaacaaaatggcgcagcaaacaattgaacagcctaaactgattcatacaaaaaaaggcgctctgtcctataaagagaagacgctcgttatggggatattaaatgtaacgccagactccttctctgacggcggcaaatacgacagtacggaaagggcgcttctgcatgcggcgaagatggctgaagaaggggcgcatatcatagatatcggcggcgaatcgacaaggcccggcgcatcactcgtttcggctgatgaggaaatgtcacgagtcatccccgtcatagaacggattacaagcgagctggacattccgctttcaatcgatacgtacaaagcgtccgtggcagacgaagcggtcaaagcgggagcctctatccttaatgacatctggggggcgaaaggtgaccctgacatggcgtcagtagccgccgcacacggagttccgattatcttaatgcataatcgtatggaaagaaactataacgatcttattcctgatatgcttgcagacttgatggaaagcgtaaaaattgccgcagaagccggcgtcacagatgaaaacatgattctggatccggggatcggctttgcgaaaaactatgaggacaatctggctgtcatgaacaagctggaggtgttcagcgggttagggtatccgctgctcctggcgacatcgagaaaaaggttcatcggccgtgtgcttgaccttccccctgaagaacgtgccgagggaacgggagcgacagtatgccttggcgtccaaaaaggctgcgacattgtgagggtgcacgatgttaaagagatcgcaagaatgactaagatgatggatgctatgctgaacaaaggaggcgcgcattatggataaagtatatgtggaaggtatggagttttacggatatcacggcgtgttcgaggaagaaaacaaactcggccagcgcttcaaagtagacctgactgccgaactggatttgagcaaagcgggaaaaacggatgacctttcttataccattaactatgcggaattgtacagtgtctgccgcggcatcgttgagggcgagcccgttaatttggtcgagacccttgcggaacggatcgcagacaccgtccttgagaaatttgagccggtgcagcaatgtacggtaaaggttgttaagcctgacccgccgattcccggccattataaatcagtagccatagaaatgacgagaaagaaatcatgaacaatacggcatatatcggcctcggttccaatatgggcgaccgtgaacattatttgcgccaggcagtggccatgctcacccggcatgatggcgtgacggtgtcaaagatatcctctatatatgaaacagatcccgtcggttatgaggatcaggatcagtttctcaatatggcggttgaagtgaaaacgtcgttatctccttttgaacttctagatgtaacacagtccattgaagctgaattaggcagaacgagagagattcgctggggaccgcggacggcagaccttgacattttgctgtataatcgtgaaaatattgaaacagagcggctgattgttccgcatccgagaatgtatgagcgcttatttgtccttgcgccgttaaaagaaatatgtccgcaggcggatcatatcacgataagcgctgaaacaaaccaagaaggtgtaagagtatggaagcagaaatctggggtaggcgaattcgtgcattcagaaagctgaaaggttatactcaagaaggatttgcaaaagcattaggtatatcagtttctattgtcggtgaaattgaacgcggaaaccgattgccgtcagatgccatcattcaagatgcggcagatgttttaaatataagtgcggacgaattggccccgcctgaaaaatagacaaatgaaaggaggggaaaaatgtttaaaatcggtgatattcaattgaaaaaccgggttgtgcttgcccctatggccggtgtctgcaactcagcgttcagattgactgtaaaggaattcggagccggattggtatgcgctgaaatggtcagtgacaaagcgatcctttacaacaacgcaagaacaatggggatgctttacattgatgaacgtgaaaaaccgctcagccttcagatttttggaggaaaaaaggaaacccttgtggaagcggcgaagtttgtagatcaaaacacgactgctgatattattgatattaacatgggatgtcccgtaccaaagattacaaaatgtgatgcgggcgccaaatggcttctcgatcctgataagatttatgaaatggtatccgcagtagtagatgctgttgataagccggttacagtgaagatgagaatgggttgggatgaagatcacatttatgcggtgaaaaacgcccaagccgttgaacgtgccggcggaaaagccgttgcccttcacggccgcacaagagtgcaaatgtatgaaggcactgcgaactgggatatcattaaagaagtgaagcaatccgtctccattcccgtcatcggaaacggtgatgtcaaaacgcctcaggacgcgaaacgcatgcttgaggaaacaggagttgacggcgtcatgatcggccgggccgcactcggcaacccgtggatgatttaccgtacggtgcagtaccttgaaaccggtgagttaaaagacgagccgaaagtccgtgaaaaaatgtcggtatgcaaactgcacttagaccgcctgattaagttaaaaggcgaaaatgtggcagtcagagaaatgagaaaacacgctgcctggtatctgaaaggtgtcagaggcaatgcgaatgtacgcaatgaaattaaccaatgtgagacgcgtgaaaaatttgtgcagcttttagatgcatttaccgccgaagcagaggcaaaagagcttcaagatgcaaaagtaggttaatatacaccctctattgctgctcactgccagcttaccgctggcagtttttctgctttttcgtgaaatcaaaatgtaacggagtgataccaatgagtcaagaagagcaaaatcatgaggaattgaacgaccagctgcaagtcagacgagataaaatgaaccagctgagagaaaacggcattgaccctttcggcgaacgtttcgagagaacgcatcaatctcaacaaatcattgacgcctaccaggagctttctaaagaagaactggaagaaaaagcgatcgaagtgaccattgcaggccgtatgatgacaaagcgcggaaaagggaaagccggctttgcgcatctgcaggacttagaaggtcaaattcaaatttacgtaagaaaagacagtgtcggcgaagaacaatatgaaatctttaaatcttcagacctcggagacgttatcggcatcaccgggaaagttttcaaaacaaacgtaggcgagctttctgtcaaagcgacatcttttgaactgctgacaaaagcactgcgtcctcttcctgataaatatcatgggttaaaagacgttgaacagcgttaccgccagcgctatctcgatctcatcgtaaaccctgacagcaaacaaacgtttatcacacgcagcaaaatcatccaagcgatgagaagatacttagatgaccatggatacttagaagttgaaacacctacgatgcacagcataccgggaggagcgtctgcacgcccgttcatcacgcaccataacgcgctcgacatgcctctttatatgcgtattgcgattgaactgcacctgaaacgcctgattgtcggcggattggaaaaagtctacgaaatcggccgcgtgttccgtaacgaaggtgtttctacacgccataaccctgaattcacgatgatcgagctgtatgaagcgtacgccgattataaagatattatgagtcttacggaaaacctcgtagcacatattgcgcaggaagtgcttggaagcaccacaatccagtacggcgaagagcagattgatctgaaacctgagtggaaacgactccacatggtagatgcggtcaaagaagcgacaggcgtagatttctggaatgagatgactgttgaagaagcgcgcggtcatgcaaaagagcatggtatcgagatcacaaactctatgacggtgggtcatatcatcaatgaattcttcgaacaaaaaattgaagaaacactcattcagcctacatttatttacggccaccctgtagagatttctcctcttgctaagaaaaatccggaggaccctcgctttacagaccgttttgagctgtttatcgtcggccgtgagcacgctaatgcgtttacggagctgaatgaccctattgaccagagggaacgctttgaagcgcaattaaaagaaagagaagaaggaaacgatgaagcgcatatgatggatgaagacttcgttgaagctcttgaatacggcatgccgccgaccgggggattgggtatcggtatcgaccgccttgtcatgctgttaacaaatgctccgtctatcagagacgttttattattccctcaaatgagacaacgctaataaaagggaaggcgccgttttctgcttatcgcagtacggcgcttttttagaaacaagccgctcgtaaaactttttgattttctttaaaaaaactattgcactattatttgtgaggtggtatattattattcgttgccgctaaacaaggcgctgacgaaaaaaagaaatttaaaaagttgttgacttcaagagattgataagatataataataaagtcgcttgaacgaaagacaaaatgatctttgaaaactaaacaagacaaaacgtacctgttaattcaaagttttaaataaatcgcacagcgatgtgcgtagtcagtcaaactactttatcggagagtttgatcctggctcaggacgaacgctggcggcgtgcctaatacatgcaagtcgagcggacagatgggagcttgctccctgatgttagcggcggacgggtgagtaacacgtgggtaacctgcctgtaagactgggataactccgggaaaccggggctaataccggatggttgtctgaaccgcatggttcagacataaaaggtggcttcggctaccacttacagatggacccgcggcgcattagctagttggtgaggtgacggctcaccaaggcgacgatgcgtagccgacctgagagggtgatcggccacactgggactgagacacggcccagactcctacgggaggcagcagtagggaatcttccgcaatggacgaaagtctgacggagcaacgccgcgtgagtgatgaaggttttcggatcgtaaagctctgttgttagggaagaacaagtgccgttcaaatagggcggcaccttgacggtacctaaccagaaagccacggctaactacgtgccagcagccgcggtaatacgtaggtggcaagcgttgtccggaattattgggcgtaaagggctcgcaggcggtttcttaagtctgatgtgaaagcccccggctcaaccggggagggtcattggaaactggggaacttgagtgcagaagaggagagtggaattccacgtgtagcggtgaaatgcgtagagatgtggaggaacaccagtggcgaaggcgactctctggtctgtaactgacgctgaggagcgaaagcgtggggagcgaacaggattagataccctggtagtccacgccgtaaacgatgagtgctaagtgttagggggtttccgccccttagtgctgcagctaacgcattaagcactccgcctggggagtacggtcgcaagactgaaactcaaaggaattgacgggggcccgcacaagcggtggagcatgtggtttaattcgaagcaacgcgaagaaccttaccaggtcttgacatcctctgacaatcctagagataggacgtccccttcgggggcagagtgacaggtggtgcatggttgtcgtcagctcgtgtcgtgagatgttgggttaagtcccgcaacgagcgcaacccttgatcttagttgccagcattcagttgggcactctaaggtgactgccggtgacaaaccggaggaaggtggggatgacgtcaaatcatcatgccccttatgacctgggctacacacgtgctacaatggacagaacaaagggcagcgaaaccgcgaggttaagccaatcccacaaatctgttctcagttcggatcgcagtctgcaactcgactgcgtgaagctggaatcgctagtaatcgcggatcagcatgccgcggtgaatacgttcccgggccttgtacacaccgcccgtcacaccacgagagtttgtaacacccgaagtcggtgaggtaaccttttaggagccagccgccgaaggtgggacagatgattggggtgaagtcgtaacaaggtagccgtatcggaaggtgcggctggatcacctcctttctaaggattttaacggaatataagaccttgggtcttataaacagaacgttccctgtcttgtttagttttgaaggatcattcgattcttcgagatattgttctttgaaaactagataacagaagtaattcacattcaattagtaatgcaagatatcacgtagtgattctttttaacggttaagttagaaagggcgcacggtggatgccttggcactaggagccgatgaaggacgggacgaacaccgatatgcttcggggagctgtaagcaagctttgatccggagatttccgaatggggaaacccaccactcgtaatggagtggtatccatatctgaatacataggatatgagaaggcagacccggggaactgaaacatctaagtacccggaggaagagaaagcaaatgcgatttcctgagtagcggcgagcgaaacgggaccagcccaaaccaagaggcttgcctcttggggttgtaggacactctgtacggagttacaaaggaacgaggtagatgaagaggtctggaaaggcccgccataggaggtaacagccctgtagtcaaaacttcgttctctcctgagtggatcctgagtacggcggaacacgtgaaattccgtcggaatccgggaggaccatctcccaaggctaaatactccctagtgaccgatagtgaaccagtaccgtgagggaaaggtgaaaagcaccccggaaggggagtgaaagagatcctgaaaccgtgtgcctacaagtagtcagagcccgttaacgggtgatggcgtgccttttgtagaatgaaccggcgagttacgatcccgtgcaaggttaagcagaagatgcggagccgcagcgaaagcgagtctgaatagggcgaattgagtacgtggtcgtagacccgaaaccaggtgatctacccatgtccagggtgaagttcaggtaacactgaatggaggcccgaacccacgcacgttgaaaagtgcggggatgaggtgtgggtaggggtgaaatgccaatcgaacctggagatagctggttctctccgaaatagctttagggctagcctcaaggtaagagtctcggaggtagagcactgattggactaggggcccctaccgggttaccgaattcagtcaaactccgaatgccgatgacttatccttgggagtcagactgcgagtgataagatccgtagtcgaaagggaaacagcccagaccgccagctaaggtcccaaagtatacgttaagtggaaaaggatgtggagttgcttagacaaccaggatgttggcttagaagcagccaccatttaaagagtgcgtaatagctcactggtcgagtgactctgcgccgaaaatgtaccggggctaaacgtatcaccgaagctgcggactgttcttcgaacagtggtaggagagcgttctaagggctgtgaagcaagaccggaaggacttgtggagcgcttagaagtgagaatgccggtatgagtagcgaaagaggggtgagaatcccctccaccgaatgcctaaggtttcctgaggaaggctcgtccgctcagggttagtcgggacctaagccgaggccgaaaggcgtaggcgatggataacaggttgatattcctgtaccacctcctcaccatttgagcaatgggggacgcaggaggatagggtaagcgcggtattggatatccgcgtccaagcagttaggctgggaaataggcaaatccgtttcccgtgaaggctgagctgtgatggcgagcgaattatagtagcgaagttcctgattccacactgccaagaaaagcctctagcgaggtgagaggtgcccgtaccgcaaaccgacacaggtaggcgaggagagaatcctaaggtgatcgagagaactctcgttaaggaactcggcaaaatgaccccgtaacttcgggagaaggggtgctctgttagggtgcaagcccgagagagccgcagtgaataggcccaggcgactgtttagcaaaaacacaggtctctgcgaagccgtaaggcgaagtataggggctgacgcctgcccggtgctggaaggttaagaggagcgcttagcgtaagcgaaggtgcgaattgaagccccagtaaacggcggccgtaactataacggtcctaaggtagcgaaattccttgtcgggtaagttccgacccgcacgaaaggcgcaacgatctgggcactgtctcaacgagagactcggtgaaattatagtacctgtgaagatgcaggttacccgcgacaggacggaaagaccccgtggagctttactgcagcctgatattgaatgttggtacagcttgtacaggataggtaggagccttggaaaccggagcgccagcttcggtggaggcatcggtgggatactaccctggctgtattgaccttctaacccgccgcccttatcgggcggggagacagtgtcaggtgggcagtttgactggggcggtcgcctcctaaaaggtaacggaggcgcccaaaggttccctcagaatggttggaaatcattcgcagagtgtaaaggcacaagggagcttgactgcgagacctacaagtcgagcagggacgaaagtcgggcttagtgatccggtggttccgcatggaagggccatcgctcaacggataaaagctaccccggggataacaggcttatctccccaagagtccacatcgacggggaggtttggcacctcgatgtcggctcatcgcatcctggggctgtagtcggtcccaagggttgggctgttcgcccattaaagcggtacgcgagctgggttcagaacgtcgtgagacagttcggtccctatccgtcgcgggcgcaggaaatttgagaggagctgtccttagtacgagaggaccgggatggacgcaccgctggtgtaccagttgttctgccaagggcatcgctgggtagctatgtgcggacgggataagtgctgaaagcatctaagcatgaagccccctcaagatgagatttcccattccgcaaggaagtaagatccctgaaagatgatcaggttgataggtctgaggtggaagtgtggcgacacatggagctgacagatactaatcgatcgaggacttaaccaatttgaatgtatgcttactgttatctagttttgagagaacactctcaatggtttggtggcgatagcgaagaggtcacacccgttcccatgccgaacacggaagttaagctcttcagcgccgatggtagtcgggggtttccccctgtgagagtaggacgccgccaagccattacacgtaagtgtaatatatggaggattagctcagctgggagagcatctgccttacaagcagagggtcggcggttcgagcccgtcatcctccaccatatttgccggcctagctcaattggtagagcaactgacttgtaatcagtaggttgggggttcaagtcctctggccggcaccatttttggacaagataataacacaagtcttttaaaaagagccattagctcagttggtagagcatctgacttttaatcagagggtcgaaggttcgagtccttcatggctcaccatgtaacgcgggtgtggcggaattggcagacgcgctagacttaggatctagtgtcttatgacgtgggggttcaagtcccttcacccgcattatacaggatagttatcctgtatgcggaagtagttcagtggtagaacaccaccttgccaaggtgggggtcgcgggttcgaatcccgtcttccgctccaactataccatccacgccggggtggtggaattggcagacacacaggacttaaaatcctgcggtaggtgactaccgtgccggttcaagtccggccctcggcattcattattatgcgcccgtagctcaattggatagagcgtttgactacggatcaaaaggttaggggttcgactcctctcgggcgcgccataatatttttaaaaatcgggaagtagctcagcttggtagagcacatggtttgggaccatggggtcgcaggttcgaatcctgtcttcccgaccacttcggggccttagctcagctgggagagcgcctgctttgcacgcaggaggtcagcggttcgatcccgctaggctccaccatttataaaaaaacatgttgactttaagagaaacttattatatacttaaaaagttgcttgagaaagtgaacaaaatgatctttgaaaactaaacaagacaaaacgtacctgttaattcaaagttttaaataaatcgcacagcgatgtgcgtagtcagtcaaactactttatcggagagtttgatcctggctcaggacgaacgctggcggcgtgcctaatacatgcaagtcgagcggacagatgggagcttgctccctgatgttagcggcggacgggtgagtaacacgtgggtaacctgcctgtaagactgggataactccgggaaaccggggctaataccggatggttgtctgaaccgcatggttcagacataaaaggtggcttcggctaccacttacagatggacccgcggcgcattagctagttggtgaggtaacggctcaccaaggcgacgatgcgtagccgacctgagagggtgatcggccacactgggactgagacacggcccagactcctacgggaggcagcagtagggaatcttccgcaatggacgaaagtctgacggagcaacgccgcgtgagtgatgaaggttttcggatcgtaaagctctgttgttagggaagaacaagtgccgttcaaatagggcggcaccttgacggtacctaaccagaaagccacggctaactacgtgccagcagccgcggtaatacgtaggtggcaagcgttgtccggaattattgggcgtaaagggctcgcaggcggtttcttaagtctgatgtgaaagccccggctcaaccggggagggtcattggaaactggggaacttgagtgcagaagaggagagtggaattccacgtgtagcggtgaaatgcgtagagatgtggaggaacaccagtggcgaaggcgactctctggtctgtaactgacgctgaggagcgaaagcgtggggagcgaacaggattagataccctggtagtccacgccgtaaacgatgagtgctaagtgttagggggtttccgcccttagtgctgcagctaacgcattaagcactccgcctggggagtacggtcgcaagactgaaactcaaaggaattgacgggggcccgcacaagcggtggagcatgtggtttaattcgaagcaacgcgaagaaccttaccaggtcttgacatcctctgacaatcctagagataggacgtccccttcgggggcagagtgacaggtggtgcatggttgtcgtcagctcgtgtcgtgagatgttgggttaagtcccgcaacgagcgcaacccttgatcttagttgccagcattcagttgggcactctaaggtgactgccggtgacaaaccggaggaaggtggggatgacgtcaaatcatcatgccccttatgacctgggctacacacgtgctacaatggacagaacaaagggcagcgaaaccgcgaggttaagccaatcccacaaatctgttctcagttcggatcgcagtctgcaactcgactgcgtgaagctggaatcgctagtaatcgcggatcagcatgccgcggtgaatacgttcccgggccttgtacacaccgcccgtcacaccacgagagtttgtaacacccgaagtcggtgaggtaacctttatggagccagccgccgaaggtgggacagatgattggggtgaagtcgtaacaaggtagccgtatcggaaggtgcggctggatcacctcctttctaaggattttaacggaatattagacctcgggtcttataaacagtacgttccctgtcttgtttagttttgaaggatcattcgattcttcgagatgttgttctttgaaaactagataacagaagtaattcacattcaattgtaatgcaagatatcacgtagtgattctttttaacggttaagttagaaagggcgcacggtggatgccttggcactaggagccgatgaaggacgggacgaacaccgatatgcttcggggagctgtaagcaagctttgatccggagatttccgaatggggaaacccaccactcgtaatggagtggtatccatatctgaatacataggatatgagatggcagacccggggaactgaaacatctaagtacccggaggaagagaaagcaaatgcgattccctgagtagcggcgagcgaaacgggaccagcccaaaccaagaggcttgcctcttggggttgtaggacactctgtacggagttacaaaggaacgaggtagatgaagaggtctggaaaggcccgccataggaggtaacagccctgtagtcaaaacttcgttctctcctgagtggatcctgagtacggcggaacacgtgaaattccgtcggaatccgggaggaccatctcccaaggctaaatactccctagtgaccgatagtgaaccagtaccgtgagggaaaggtgaaaagcaccccggaaggggagtgaaagagatcctgaaaccgtgtgcctacaagtagtcagagcccgttaacgggtgatggcgtgccttttgtagaatgaaccggcgagttacgatcccgtgcaaggttaagcagaagatgcggagccgcagcgaaagcgagtctgaatagggcgaattgagtacgtggtcgtagacccgaaaccaggtgatctacccatgtccagggtgaagttcaggtaacactgaatggaggcccgaacccacgcacgttgaaaagtgcggggatgaggtgtgggtaggggtgaaatgccaatcgaacctggagatagctggttctctccgaaatagctttagggctagcctcaaggtaagagtctcggaggtagagcactgattggactaggggcccctaccgggttaccgaattcagtcaaactccgaatgccgatgacttatccttgggagtcagactgcgagtgataagatccgtagtcgaaagggaaacagcccagaccgccagctaaggtcccaaagtatacgttaagtggaaaaggatgtggagttgcttagacaaccaggatgttggcttagaagcagccaccatttaaagagtgcgtaatagctcactggtcgagtgactctgcgccgaaaatgtaccggggctaaacgtatcaccgaagctgcggactgttcttcgaacagtggtaggagagcgttctaagggctgtgaagcaagaccggaaggacttgtggagcgcttagaagtgagaatgccggtatgagtagcgaaagaggggtgagaatcccctccaccgaatgcctaaggtttcctgaggaaggctcgtccgctcagggttagtcgggacctaagccgaggccgaaaggcgtaggcgatggataacaggttgatattcctgtaccacctcctcaccatttgagcaatggggggacgcaggaggatagggtaagcgcggtattggatatccgcgtccaagcagttaggctgggaaataggcaaatccgtttcccgtgaaggctgagctgtgatggcgagcgaattatagtagcgaagttcctgattccacactgccaagaaaagcctctagcgaggtgagaggtgcccgtaccgcaaaccgacacaggtaggcgaggagagaatcctaaggtgatcgagagaactctcgttaaggaactcggcaaaatgaccccgtaacttcgggagaaggggtgctctgttagggtgcaagcccgagagagccgcagtgaataggcccaggcgactgtttagcaaaaacacaggtctctgcgaagccgtaaggcgaagtataggggctgacgcctgcccggtgctggaaggttaagaggagcgcttagcgtaagcgaaggtgcgaattgaagccccagtaaacggcggccgtaactataacggtcctaaggtagcgaaattccttgtcgggtaagttccgacccgcacgaaaggcgcaacgatctgggcactgtctcaacgagagactcggtgaaattatagtacctgtgaagatgcaggttacccgcgacaggacggaaagaccccgtggagctttactgcagcctgatattgaatgttggtacagcttgtacaggataggtaggagccttggaaaccggagcgccagcttcggtggaggcatcggtgggatactaccctggctgtattgaccttctaacccgccgcccttatcgggcggggagacagtgtcaggtgggcagtttgactggggcggtcgcctcctaaaaggtaacggaggcgcccaaaggttccctcagaatggttggaaatcattcgcagagtgtaaaggcacaagggagcttgactgcgagacctacaagtcgagcagggacgaaagtcgggcttagtgatccggtggttccgcatggaagggccatcgctcaacggataaaagctaccccggggataacaggcttatctcccccaagagtccacatcgacggggaggtttggcacctcgatgtcggctcatcgcatcctggggctgtagtcggtcccaagggttgggctgttcgcccattaaagcggtacgcgagctgggttcagaacgtcgtgagacagttcggtccctatccgtcgcgggcgcaggaaatttgagaggagctgtccttagtacgagaggaccgggatggacgcaccgctggtgtaccagttgttctgccaagggcatcgctgggtagctatgtgcggacgggataagtgctgaaagcatctaagcatgaagccccctcaagatgagatttcccattccgcaaggaagtaagatccctgaaagatgatcaggttgataggtctgaggtggaagtgtggcgacacatggagctgacagatactaatcgatcgaggacttaaccaatttgaatgtatgcttactgttatctagttttgagagaacactctcaatggtttggtggcgatagcgaagaggtcacacccgttcccatgccgaacacggaagttaagctcttcagcgccgatggtagtcgggggtttccccctgtgagagtaggacgccgccaagctatatttacggtaaaggcagctcatcatgagctgccttttttgtgtttttctgcatacgttatatagtatgagaaaagtaacgatatggctttttgcaaaagcaggttttatgcttgtgtaaagtggaaataatagagatagagcgatacagttgaaaaattttgcgaaacaccttatagtaagattaaagtcaaatatagtcaaagtcaataaaggagggggttgagtgggacataatatttctgacatcattgaacagtacttgaaacaagtattagatcaaaatggcaaagaaattttagagatcaaacgcagtgaaatcgctgataaatttcaatgtgttccttcccaaataaattatgtcatcaacaccagatttacaagtgaaagaggatatattgttgaaagtaaacggggaggcggcggttatattcgtattatcaaaattaaaatgaataacgaagtcgtcctcatcaataatattatttcgcagatccatacccacttgtcccaggcagcctctgatgacattattctcagactgttagaggacggagttatttcggaaagagaagctaaaatgatggtgagtgtaatggatcgttcagttctatatattgatttgcccgaacgggatgaactaagagccagaatgatgaaagcaatgctcacatctttaaaactaaagtaagcgggtgaaaagattgatttgtcaagaatgcaatgagagaccggccacttttcactttacgaaagttgttaatggagaaaagcaagaagttcatatttgtgaacaatgtgcaaaagaaaatagcgattcatacagtataagtggaaaccaagggttctcaattcataatttattatcaggactgctgaatatggagtcctcatttcaaaacaccggttctcaaatgttcggctactcagagcaaggcacagcttgtaagaaatgcggtatgacgtttcagcagctgagaaaaacagggcgtttcggctgtgcggaatgttacgatacgttctacagccaaattacgccgatcttgcgaaaagttcacagcgggaatacggtgcatgccgggaaaattccaaaacgaataggcggaaacctgcatgtaagacggcaaatggaaatgttaaaaaaagaacttgaatctttaatacaccacgaagagtttgaaagagcagcggaggtcagggatcagatccgatcgttagagcaggaattaaaaagtacagacagtgagggggaacaagggtaatgtcgctcaagcattttattcaggacgcactaagcaattggatgaagcaaaagggacctgaaagtgacattgtactcagcagccgtatacggttggcccgaaactttgaaaatataaagtttcccgcccggtatacgaatgaagaagcctcatccatcattcagcaattcgaagatcatttttcaggtaaggaactgcctgatatcggtcaatttcatttaatcagaatgagtgaagctcagcctttggaaaaacgggtgctgatggagaaacatctgatcagcccgaatttaacggaatctccttttggcggctgtctgctttctgaaaatgaagaagtcagcattatgttaaatgaagaagatcatatcagaattcaatgcctcttccccggcttccagcttctcaacgccataaaagcggcaaaccaggttgatgactggattgaggagaaagtggattacgcctttggagagaagagagggtacttaacaagctgtcctacaaatgtagggacgggactaagggcttcagtcatgatgcatttgccgggtcttgtattaactaggcaaatgaatcgaattataccggcaattaaccaattaggcttagttgttagaggaatttacggtgaaggcagcgaagcattaggaaatatctttcaaatttcaaatcaaatcacactcggaaaatcagaacaggacattgtagatgatttaaacagtgtggctgcccagctgattgagcaggaacgttcagcccgagaagcgctttaccaaacttcgaaaattgaattggaggaccgggtattcagatcttacggcgttttatccaactgccgtatgattgaatcaaaggaaacggcgaaatgcctttctgacgttcggctggggatagaccttgggatcatcaaagggctatcaagcaatatacttaatgaactgatgattttgacacagccgggttttctccagcaatattcgggcggtgcattacggccgaacgaaagagacgcgagaagagcggcgcttatcagggaaaggctgcatttagaaatgagtgcaaatagacaggaggatgattcgatatgatgtttggaaggtttacagagcgagctcaaaaggtattggcactggcacaggaggaagcactgcgcttaggccataacaatattggaactgaacatatcttattaggtctggttcgtgaaggagaagggattgcggctaaagcactccaagcactcggactcggttcggataaaattcagaaagaagtggagagcttaatcggacggggacaggaaatgtctcaaacgattcattatacgccaagagcaaaaaaagtcattgagctcagcatggatgaagccagaaagctaggacattcttatgtgggaacagaacacatacttctcggattgatccgtgaaggagaaggcgtggcggcgagagttctgaataatctcggtgtcagcttaaataaagcgagacagcaagtgctgcagcttctgggaagcaatgagacggggtcttctgcatccggtaccaacagcaatgcaaacacgccgacgcttgacagtctggcgcgtgatttaactgcgattgcgaaggaagacagtcttgatccggttatcgggcgaagcaaagaaattcagcgtgttattgaggtattaagccgcagaacgaaaaataatcccgttcttatcggagaaccgggtgtaggtaaaactgcgattgctgaaggcctcgcacagcagatcatcaataatgaagtgccggaaattttacgtgataaacgcgtaatgacgttagacatgggtacggttgtagccggtacgaaataccgcggagaatttgaagaccgcttgaaaaaagtaatggatgaaatacgtcaggccggcaatattattttattcattgacgaactgcatacactgatcggagcggggggagcagaaggtgcgattgacgcatcgaatattttaaaaccttcactggcccgcggagagcttcaatgcatcggtgccacaacgcttgatgaataccgtaaatatatcgaaaaagacgcggctctcgagcgccgtttccagccgattcaggtggatcagccgtcagccgatgaaagcattcaaattttaaaagggctccgtgaccgctatgaagcgcatcaccgcgtatccattaccgatgaagcgatcgaagccgcggttaaattgtccgaccgttatatttctgaccgcttccttccggataaagcgatcgatttaattgatgaagccggttcaaaagtgcgtctccgttctttcacaacgcctccgaacttaaaagagcttgagcagaaactcgatgaagttcgcaaggaaaaagacgctgccgttcagagccaggagtttgaaaaagcggcttcccttcgtgatacggagcagcgcctgagagaacaggtggaagacacgaaaaaaacctggaaagaaaaacaaggccaggagaactccgaagtttctgtagaggatatcgcgatggttgtatccagctggaccggggtgcccgtatctaaaattgcccaaacggaaacagataagcttctcaatatggaaagcattctgcattcccgcgtcatcggccaggatgaagccgttgtagccgtggcaaaggctgtcagacgtgcaagagccggactgaaggacccgaaacgtccgattggttcattcatcttcttaggccctacaggcgttgggaagacagagctggcaagagcgctggcggaatccattttcggtgatgaggaagcgatgatcagagtggatatgtccgaatacatggagaaacactcgacttcacgtcttgtcggttctcctccgggatatgtcggctatgatgaaggcggccagctgacagaaaaagtgagaagaaaaccttactctgtcgtattgcttgatgaaattgaaaaagcacaccctgatgtgtttaacattctcctgcaagtgcttgaagacggacgcttgactgattcaaaaggacgcactgtggatttccgcaacacgatcctgattatgacgtcaaacgtcggggcgagcgagctgaagcgcaacaaatatgtaggcttcaatgtccaggatgaatcacaaaaccataaagacatgaaagacaaagtcatgggagagttgaagcgtgccttcagacctgagtttatcaaccggattgacgaaattatcgtcttccactcccttgagaaaaaacatcttacagacatcgtgtcgcttatgtctgatcagttaacaaaacgtctgaaagaacaagatctctctatcgagctgacggatgctgccaaagcaaaagtagcagaagagggcgtcgatttggaatacggcgcacgtccgttaagaagagcgattcaaaagcatgtggaggaccggttatcagaagaactcctcagaggcaatattgataaaggccaacacattgttcttgatgttgaggacggcgaatttgtcgtaaaaacaactgctaaaacgaactaatatagtgacaaacatgaggcatacgtaagcgagtgtatgcctcactttgttatatagagaaatattcgataaggaagaggtcttacaacatatatggctaaatcaaaaacaaaattcatctgccactcatgcggttatgaatccgcaaaatggatgggaaagtgcccgggctgcggggcttggaatacaatggtggaagaaaccataaaaaaagcgccggcgaatcggcgggcggctttctcccactccgttcaaaccgtccagaaaccatcacccattacatcaattgaaacatcagaagaaccccgcgttcaaacaaagctcgaagaattcaacagagtgcttggcggcggcgttgtgaaaggctcgttagtattgatcggcggcgatcccgggatcggaaaatcaacgctccttctccaagtatccgcacaattagcagatacggccggcagcgtgctttacatttcaggggaagaatccgtgaagcaaacgaagctgcgcgccgacagacttggcatcaacagccaaatgttacatgttttatctgaaaccgatatggagtatatttcgtctgctatacaagagatgaaacccgcatttgttgtcgtagactccattcagaccgtttaccaaagtgatatcacctcagctcccggcagtgtatcacaagtaagagagtgtacggccgaattgatgaaaatcgcgaaaacaaacggcatacctatttttatcgtcggacacgtcacaaaagaaggatcgatcgcagggccgagattgcttgagcacatggtcgataccgttctatactttgaaggagagcggcatcatacattccgtattttgcgggccgtaaaaaaccgtttcggctcaacaaatgaaatgggcatctttgaaatgcgggaagaggggcttacggaagtgctcaacccttctgaaattttcttggaagagcgttctgccggggcatcgggttcgagtatcgttgcgtcaatggaaggaacgagaccgattctggttgaaatccaggcgctcatatcaccgaccagttttggaaacccgcgccgcatggctacaggcattgaccacaacagggtatcgttaattatggctgtgcttgagaagcgggtgggtcttttgcttcaaaatcaagatgcatatttaaaagtcgccggcggggtcaaactggatgaaccggcgattgatttggcagtagccgtcagcattgcctcaagcttcagagatacaccgccgaatcccgcagattgctttatcggtgaagtgggactgacaggagaagtccgcagggtgtcaagaatcgaacagcgcgtaaaagaagcggcgaaactcggcttcaagcgcatgatcatacctgaggcgaatgcagatgggtggacaataccaaaagggattgaggttgtcggagtagcaaatgttgcagaagcgcttcgtacttcattaggaggatcataatagatggaaaaagagaaaaaaggggcgaaacaagagcttgacctgtctgcaattctgcagttcgttgcaccgggcaccccgctcagagccgggatagagaatgtacttcgggcaaatacaggcggcctgattgttgtcggatacaatgataaggtaaagcaagtcgtcgatggcggttttcatattaatacatcatttgcgcccgctcacttatacgagctggccaaaatggacggtgccattattttaagtgattccggccagaaaattctttatgcgaatacacagcttatgccggaggcgaccatttcttcttcagaaacgggaatgaggcaccgtacggcggaacgggtggcgaagcagaccggctgtctcgtcatcgccatttctgagcgcagaaatgtcattacgttatatcaggacagcatgaagtacacactaaaggacataggttttattttaacaaaggcaaatcaggccattcaaacgctcgagaagtataaaaccattttagacaaaacaattacggctctaaacgcattagagtttgaggagcttgtgacattcagtgacgtgctgtctgtcatgcatcggtatgaaatggtgctccgaataaaaaatgaaatcaatatgtatattaaagaactcggaacggaaggacacttaatccgtctgcaggtgattgaactgattacggacatggaagaagaggcggcacttttcatcaaagactatgtcaaagaaaaaatcaaagatccgttcgtgctgttaaaagagctccaggatatgtccagctatgatctgctggatgattccattctgtttaaactgcttggatacccggcttctacgaatcttgatgattatgtgctcccgagaggctacaggctgctgaacaaaattccgcgtctgccgatgccgattgttgaaaatgtggttgaggcgttcggatttttgcccagcataacggaagccactgtagaagagcttgatgatgtcgagggtatcggcgaagtgcgcgcccaaaaaatcaaaaaaggcttaaaacgccttcaggaaaaacactatatagatagacagctttaagtatcgcttaaacctgtcggaatccgggtatattattgttagtttttgtttattctgaatttgtaggctctgacagtctgctgaaaaaatgctacttaaaaggaggtggaggtatgttaaaacgaatagttcaggcgttcttcattattgtgggcggcgttgtcggtatctttttaatacctgaattgtttgtgctgtcaaatatacaggacatacctttaataacaaacgcatatacgtctgctgcaattggtgctattatcttttttctcatcagtatatggacgacagaatatgtgattaattgggtaaaatggattgaagattctttgctgagagctccggtgccggatctgttattcgggagtctcggattggtttttggacttatcatcgcatatctcattgtaaacgtgattccgctggacaatattccgtaccgtatattcagcaccatcattccggtctttctggctttctttctcggttatctgggcttccaagtcggatttaagaaaaaggatgaactgatcagtcttttctccatttctgcaagaatgcagaagaaaaagggaagtgctgatgaggagcaggaagaacaggataaaaggctgaaaatcttggatacaagtgttattattgatgggagaattgcagatatttgtcagacgggctttttagaaggcgtcattgtcattcctcaatttgtgctggaggaattacagcatatcgctgattcttcagatgttttaaaacgtaacagaggacgccgcggactggatatcttgaatcgcattcaaaaggaactggatattacggttgaaatttatgaaggcgacttcgaagacattcaggaggttgacagcaagcttgtcaaacttgcgaagctgacatccggtgtcgttgtgacgaatgattttaatttaaataaagtatgcgagcttcaaaaggttgcggtactgaatattaatgaccttgcaaacgcggtgaagccggttgtgcttccgggcgaagagatgaatgtgcaggtgattaaggacgggaaagagcataatcaaggtgtggcttacttagatgacggcacaatgattgttgtggaagaaggccgcaattatatagggaaacatattgatgtgctcgtaaccagcgtactgcagacagcggcgggacgaatgatttttgccaagcccaagctgcttgagaaagctctttaagagggagttcatatggagtatgttgtcgttattccggctgccggacaaggaaaacggatgaaggccgggaaaaataagctgttcatcagcttaaaaggtgcgcccgttattatacacacactgcgggtttttgaaagccacgcaccctgtcagaaaataatcctggtgataaacgagagtgaacgggaagattttcgccagctgctggtccaatttccgattcagacggaaattgagcttgttaccggaggtgcggagcgtcagcacagtgtatacgaaggactgaaagtgattgataaggaatcggtcgtgcttgttcatgacggagcgcgcccgtttgtcacacatcagcatatcgataagctcgttgaaacagcagaggaggcgggagcggctgtcctggctgttcctgtgaaagacacgataaaacgggcggaaggctcccgggctgcggagacctttgatcgttcaagcttgtgggccgttcaaacgccgcaagcttttcgtctttctttattgaagacggcgcatatggaagcggaaaacaaaggcttcttaggtacggatgacgccagcctcgtcgagcgtcttgatggatatcaggtgagtatcgttgaaggcagctataccaatattaagctgacaacgccggatgacctgatatttgcggaagcaatcatgaaagcggaaagtgggaatcataatgtttagaatcggacaaggatttgatgtgcatcaattaacggaaggccgtccgctcatcatcggcggaattgaaattccttatgaaaagggactgctcggacattcagatgctgatgtattgctgcatacagtcgcagacgcgtgtctcggagcggcaggtgaaggagatatcggcaagcatttcccggatactgatccggaattcaaggatgctgattcttttaagctgcttcagcatgtctggaacattgtaaaagaaaaagggtacgtactcggaaatatagactgcacgattattgcgcaaaagccgaaaatggcgccgcatattgatgctatgagaaaacggatagcggaaggccttgaggcggacgtctctcaagtaaacgtaaaagcgacgacgactgaaaagctcgggtttaccggaagagccgaaggaattgccgctcaggcaaccgttctgattcaaaaagcctgatcattgttttgatgccgggtctatttggtggtagaatagatacatatattcggctagaggctacagacgagatgaaaggaagtatttgaacatgggaaatgaagtacgcgttcgttatgcaccgagtccgaccggacatttgcatatcggtaacgccagaacggcgctttttaactatttatttgcccgcagccaaggcggaaagtttattatccggattgaggatacggacaaaaagcgaaatattgaaggcggagagcaaagtcagcttaactatttgaaatggctcggcatggactgggatgaaagtgtggatgtcggcggagaatacggcccgtaccgccagtctgagcgtaacgacatttacaaagagtactatgaagagcttcttgaaaaagggcttgcttataaatgtttctgtacggaagaagaacttgaaaaagaacgtgaagagcaaatcgcccgcggggaaatgccgcgctattccggcaaacacagaaacctgactcaggaagagcaggagcagtttttagccgaaggcagacagccgagcatccgtttccgcgtgccggaagggaaaatcatcgcatttaacgatatcgtaaaaggcgagatttcttttgaatcagacggcatcggcgactttgtcatcgtcaaaaaagacggaacaccgacgtataactttgccgtcgcgattgacgattacttaatgaaaatgacgcacgtgctccgcggtgaggatcacatttcaaatacaccgaaacagatcatgattttccaggcattcggctgggatattcctgtcttcggacatatgacgcttatcgtaaacgaaagccgcaaaaaattaagtaaacgtgatgaatcaattatccagtttattgagcagtatgatgagctgggttacctgcctgaagcgctgtttaactttatcggacttctcggctggtctcccgtcggtgaagaagagcttttcacaagagaacaattcattgaaatttttgatgtaaatcgtttgtctaagtcaccggctctgtttgatatgcataaactgaaatgggtcaacaaccaatacgtcaaagcgctggatcttgatcaagtggttgagctgaccctgccgcacctgcaaaaagcaggaaaagtcggcactgagctttctgccgaagaacaggaatgggttcgtaaattaatctctctttaccatgagcaattgagctacggcgctgaaattgtcgagcttactgatttgttctttaaagatgagatcgagtataatcaagaggcaaaagccgttctggaagaagaacaggtgcctgaagtgctcagcgtatttgctgcgaagcttgaagagcttgaagaatttacgcctgagctgatcaaagcctcaatcaaagctgttcagaaagaaacaggccataaaggcaaaaagctgttcatgccgattcgtgtagcggttaccggtcagacacacggtccggagcttccgcaggccattgagctgatcggcagagaaacagccgtcagacgcctgaaaagcatttaaatatacgattgttgacagggaagagtataaaacaatgaccattacagaaagaatcttcatcggctgagagagattcatgcgtcatgttttagaagtgcgcccttaagacctttgaagaacatttctgcggaaatcagtatttaaaggcggccgccgccgttaccggcttttaagttgggaaaacattgacttgtttttcaaacagagtggaaccgcgcggtaaaagcgtctctgtcatgtttacatgcagaggcgctttttttataggcggaaaaacagactggagcggggagagaatggggggaagcatgtgttttttaaaatgctaaaagaagacatagatacagtgttcgatcaagatccggcagcaagaagctatttcgaagttgttttaacttattctggtttacatgctatatgggcgcatcggattgcacatgctttatataaacggagatttttcttcctggcgcgcctgatatcacagattgcccgtttctttaccggaattgaaatccatcccggcgcgaccatcgggagaaggtttttcattgaccacggtatgggggtcgtcataggggaaacatgtgaaatcggcaataacgtgacggtattccaaggtgtcactctcgggggaacgggaaaagaaaaggggaagcggcatccgaccataaaagatgatgctttaattgcaaccggagcgaaggtgctcggctctattacggtcgggcagggttctaaagtaggggccggctccgttgtgcttcgtgatgttcccgacttttcgaccgttgtcggcataccggggaaagtcgtcattcagaacggaagaaaaatcaaacgcgatctcaatcaccaagacttgcccgatccggttgctgaccggtttagagcattggagcagcagatttttgaactgcaggctgaactggaagataaaaaagaaaggatcaaccaaaaatgaccattacactttataatacattgacacggaaaaaggaaacatttgttcctcttgaggaaggcaaagtaaaaatgtacgtgtgcggacctactgtatacaactatattcatatcggaaacgctcgtccggcgattgtgtatgataccgtacgcaactatttggagtataaaggatacgatgttcaatacgtatcgaatttcaccgatgttgacgacaaactgattaaagcggccaacgagctcggcgaggacgtcccgaccgtttctgaacggttcattaaagcgtattttgaagacgtgggcgccctcggatgccggaaagcggatcttcacccccgggtcatggaaaacatggacgccattattgaatttgtcagcgagctgattaaaaaaggctacgcttatgaatcagaaggcgacgtctatttcaaaacaagggccttcgaaggctacggcaagctatctcagcaatcaattgatgaactcagatcaggcgcgcgtatccgtgtcggcgagaagaaagaggatgcgctggactttgcgctttggaaagctgctaaggacggagaaatttcatgggatagcccttggggaaaaggccgcccgggctggcatattgaatgctccgcaatggtgaaaaagtatttgggtgacgaaatcgatattcacgccggcggtcaggacctgacattcccgcaccatgaaaacgaaatcgcgcaatctgaagcattaacaggcaagacattcgcaaaatactggcttcacaacggatatatcaatatcgataatgagaaaatgtcaaaatcgctcggcaactttgttttggtgcacgatatcattaagcaatatgacccgcagcttttgagatttttcatgctttccgttcattaccgccacccgatcaactattcggaagagctgcttgagaaaacaaaaaacgcgtttaaccgcctcaagacggcatacagtaatttaaaccatcgtttgattagcagcacgaatctgactgacaatgatgaggaatggctcgctaaaatcgaagagcaccgcgcttcgtttgaagaagcaatggatgatgattttaatacggcgaatgcgatttccgtttggtttgatctggcgaagctcgccaattactacatgcaggaagacaatacggcggatcacgtcattaaagcctttatcagcatgtttgacagaatcggatctgttctcggacttacgctcggcgaagaagagcttgtcgacgaagagattgaagagttgattgagaagagaaatgaagcccgccgcaatcgcgatttcgctttgtcagaccagattcgcgatcagctgaaaagcatgaatatcattcttgaagacacagcccagggaactcgctggaagcggggagaataagcggatgcttcaatttgaacaaatcaaagattcaaagcagttaaacggtcttgcgcttgcttatatgggtgatgccatttttgaaatatacgtccggcatcacctgcttaagcagggctttacgaaaccgaatgaccttcataagaaggcgagccggattgtatcggcaaaatcacaggcagacatattgttccgccttcaggacgaatcctttttcacggaggaagaggaagccgtgctgagaagaggcagaaacgcgaaatcagggaccacgcctaaaaacacagatgtacagacgtaccgccatagtacagcttttgaggctttactcggatacctttttcttgagaaaagagaagaaagactgaatcagctgattgctgaggctatacaagtcgggacgtcagggaggaaaacaaatgagtcagcaacatgattacgtcataggaaaaaacgctgtgattgagacgttaaagtcagatcgcaagctgtataagttatggatggcggaaaacacagtaaaaggacaggcgcagcaagttatggagcttgctaaaaagcgcggcgtcaccattcaatttgtaccgaggaaaaaactcgatcagatggtggaggggcagcatcagggtgttgtcgcccaggtggcggcatatgaatatgcacaattagacgaattatataaaagagcggaagagagaaacgaacagcctttctttctcatattggacgagctggaagaccctcataatctcggttccatcatgagaacggctgacgctgtcggtgcacacggcattgtgattccgaaacgcagagcggtcggactgacatcgacggtcgcaaaagcttcgaccggtgcgattgaacacattcccgtcgtgaaggtgaccaaccttgcccggacacttgatgaaatgaaggagcgggggatttgggtcgtcggaacggatgcatccgcccgggaagactaccgctctatggacggcaagatgcctttggcgctcgttatcggaagcgaaggcagaggaatgggccggcttgtgaaagagaaatgtgattttctcattaaacttccgatggccggaaaagtcacgtctctgaatgcgtcggtagcggccggccttctcatgtatgaagtctaccggaagcgcaatcctttaggggaataatgacagatggacatcctgttagtagacggatacaacatgattggagcttggccgcagctaaaggatttaaaagcgaacagttttgaagaagcgagagatgtactgatccagaagatggcggaatatcagtcctacacgggaatcagagtcattgtggtgtttgacgcacatctggtaaaaggcatagagaaaaaacaaacgaatcacagagtcgaagtgatttttacacgggagaatgagacggcggatgagcggatcgagaaacttgcccaggcgctgaataatattgcgacacagattcatgtcgcaacctccgattatacggagcagtgggcgattttcggacaaggggctctccgcaaatccgcccgggagcttctgagggaagtggatacgatagaacggcggattcaaaggcgggtttcaaagatcacttctgaaaaaccaccgggtaaaatcgagctgtccgaagaggttttgaaaacgtttgaaaagtggcgccgaggcggtctggattaggttgacgctttttcgcccattaatgtataatatttctatctacgtgcgccggggggatcgcagtgaatctacagaacagcaagggaaagttcaacaaagtgcaattttgccagttggaggacgagcaggtcattgaaaaggttcatgttggggatagtgatgcgttagattacttgattacgaagtaccgtaattttgtacgggcgaaagcaaggtcttattttttaataggggccgacagagaagatattgtacaggaagggatgataggcttatataagtctatccgagactttagagaggacaagcttacttcatttaaagcttttgcagaattatgcattacccgccagattattaccgcaataaagacagctacccgtcagaaacacattcctttaaattcctatgtttctttagacaaacctatttttgatgaagaatctgacagaacactgcttgatgtcatttcaggcgctaaaacgttaaatcctgaagagatgattattaatcaggaagaatttgatgatatcgaaatgaaaatgggagaactgctgagcgatctggagagaaaggtgcttgttctgtacttggacggaagaagttaccaggaaatttcagatgatttaaaccgacacgtaaaatcaatcgataatgccctgcagcgcgtgaagcgcaagcttgaaaagtatttggaaataagagaaatcagtctgtagcgggtttctgtgtcatattgacagaatttttctgactgtgctattttattaagataaatgattgtttaggaaaaggtgtaacgacatgagaaaaaagattacgctggcatgcaaaacatgcggaaatcgtaattatacgacaatgaaaagctctgcatcagcggctgagcggttagaagttaagaagtactgcagcacttgcaattcacatacagctcatttagaaacaaaatagtgttcgctttttaaattgtggaggtcttttacatgcgcatgatgagtttctttaaagatgttgggaaagaaatgaaaaaggttagctggcctaaaggcaaagagttaacgcgctatacgatcacggtgatttcaacggttatcttttttgttatcttttttgccctccttgatacaggaatttctcaattaattcgtttaatagttgaataatgatcagcaatacgtgctataatagatcataatatcgtttgccaaaacccgttcagcgggttttttattgtgttgaaaaaaggattcataggctctgagcctattttttgttttacacttcatttttaaatgcggggagggaaggactgcagagtcctgatagaatggaaaagaattggtatgttgttcatacgtattccggttatgaaaacaaagtaaaagcgaaccttgaaaaacgtgtggaatcaatgggaatgcaggataaaattttccgcgttgtcgtccctgaagaggaagagactgatattaagaacggcaagaaaaaagtagtcaaaaagaaagtgttcccgggttatgtgcttgttgaaatcgtcatgactgatgattcctggtatgtggtccgcaacacgccgggcgttaccggattcgtcggatcagccggttcaggctcaaagccgactccgcttcttcctggcgaagcggaaaccatcttaaagcggatgggcatggatgagcggaaaaccgacattgattttgaattgaatgagacagtcaaagtcatagacggacctttcgccaactttacaggatcaattgaagagattgattatgataagagcaaagtgaaagtattcgttaacatgttcggccgtgaaacgccggttgagctggaatttacccagatcgacaaattgtaatgtgaaaaaacttgaaattgctatatattaatgataatatagcaaaggtacgtcttggactaatccaaggcagctagcttgatatttcgtcattcatataaagaatgaaaccttgagtgggagggtttaccctattaccacatcacggacttaaggaggtgtgtctcgtggctaaaaaagtagtaaaagttgtaaaattgcaaattcctgctggaaaagctaacccagcgccgccagttggacctgcactaggtcaagccggtgtaaatatcatgggattctgtaaggagtttaacgctcgtacagctgaccaagctggtttaatcattcctgttgaaatttcggtttacgaagaccgttcatttacatttattacaaaaactccgcctgctgcagtattgcttaaaaaagcagctggaattgagtctggttctggtgaaccaaaccgtaataaagtggcaaccgttaagcgcgataaggttcgcgaaatcgctgaaacgaaaatgcctgacttaaacgcagcagacgttgaagcggcaatgcgcatggttgaaggtactgcccgcagtatgggtatcgttatcgaggattaatttgtttcttgtcgggttgcgagttttcacaagttcgcaacccttattcgtgggaggttattccgctataaccacataaggaggaaattttaaaatggctaaaaaaggtaaaaagtacgttgaagctgcgaagcttgtagaccgtgcgaaagcttacgacgtcgctgaagcagtggcgcttactaaaaaaacaaacacagctaaattcgacgctacagttgaagttgcttttcgtttaggggttgaccctcgtaaaaacgatcagcaaatccgcggtgcagttgtacttcctaacggaactggtaaaactcagcgcgtgcttgtattcgctaaaggcgaaaaagcaaaagaagctgaagctgccggtgcagactacgtcggtgattctgattacatcgcgaaaatccagcaaggctggttcgaattcgatgtaatcgttgcgactcctgacatgatgggtgaagtcggtaaaatcggccgtgtgcttggaccaaaaggtcttatgccaaaccctaaaacaggaactgttacattcgaagtagaaaaagcaatcggcgaaatcaaagctggtaaagtagaataccgcgttgacaaagctggtaacatccatgttccgatcggaaaagtttctttcgaggatgaaaaacttgttgagaacttcacaacaatgtatgatacaatcctgaaagcaaaaccggctgcggctaaaggtgtttacgtgaaaaacgttgccgttacttctactatgggccctggtgtcaaagtagacgcttctactttcaacgtaaaataatatttgactttagatcagcattctgatatgattcaaaatgttgtaaaatataatatgtcatttataccgtagacagcaggggccgttgaggcttaatatcctgccgaggtgtatatatatcacagctattacgttacgtatgcttgtatatacagcctccatgtccacatggaggctttttatatgaaatcgtcgtcacagtcgtgatcacctagcggtataagtgttacacaaaatctacaggaggtgtaaccatgagcagcgcaattgatacaaaaaaagttgttgttgaagagattgcttctaaactgaaagaaagcaaatcaacgatcatcgttgactaccgcggacttaacgtttctgaagtaactgaactccgtaaacagcttcgcgaagctaacgtagagttcaaagtgtacaaaaacacaatgactcgccgtgcggttgaacaagctgaacttgatggtttgaatgatgtcttaactggaccgaatgcgatcgcattcagtactgaagatgttgtcgctccggcaaaagttcttaacgagttcgcgaaaaatcacgaagctctggaaatcaaagcgggcgttatcgaaggaaaagtatcttctgttgaagaagtgaaagctcttgctgaacttccttcacgcgatggcttactttctatgttgcttagcgtacttcaagctccagttcgcaaccttgcacttgcagctaaagcagttgcagaccaaaaggaagaacaaggcgcttaatctgattttaccctaaaataaaacaaatggaggaatttcaaatggctttaaatatcgaagaaatcattgcttccgttaaagaagcaactgtacttgaattgaacgacctagtaaaagcaatcgaagaagaatttggcgtaactgctgctgctcctgtagctgtagctggcggagctgctgctggcggcgctgctgaagagcaaagcgaattcgaccttatccttgctggtgcaggttctcagaaaatcaaagttatcaaagttgttcgtgaaatcactggtcttggcttgaaagaagctaaagaacttgttgacaacactccaaaaccacttaaagaaggtattgcgaaagaagaagctgaagagcttaaagctaaacttgaagaagttggcgcttctgtagaagttaagtaatcttcacttgcctgtaggggaagctcgcttttatgaggcgggctttttctttgcttttctttaagtgcaattaaaaaaggaggttctaataatgagtgaacactattattcagaaaaaccttcagttaaaagcgataaacagacatggtcatttacactgcggaacagatcttatacattcacaagtgacagcggcgttttctcgaaaaaggaagttgatttcggttcgcgtgtcttaattgaagcgtttgaagagccggagatcgatggtgacttcctggatgcaggctgcggttacggcccgatcggtctgtcgctcgccggtgcatttacagaccggaccgtgcacatgattgacgtgaatgaaagagccgtagagctgtcaaatgaaaatgcagaaaaaaacggaataaaaaacgttcggatttatcagagtgatttattttcaaatattgattctgctcaaacatttgcttctattattacaaaccccccaatccgcgccggaaaaaaagttgtccatgccatttttgaaaaaagcgctgagcatttaagggcttcaggtgaattgtggatcgttatacagaaaaaacagggcgggccttctgccattgaaaaactgaaggagctttttgacgaagtttctgtggttcaaaaaaagaaaggctattatatcataaaagcaaaaaaagtttgacttgaattttcagctatgttaatattgtaaaatgccaatgtatatattttgcatgatatgctcaaataatcatagtgcatgtataaattatacaaacatggaaatgctaataaaatcggtatttgtttttggatgtggttttcttaattagaaacccttttttcttttgtcttgtaaaagtatttctttatcgtaagagatgcttattacacatataatacgcatgatttgaggggtgaatcagttgacaggtcaactagttcagtatggacgacaccgccagcgcagaagctatgctcgcattagcgaagtgttagaattaccaaatctcattgaaattcaaacctcttcttatcagtggtttcttgatgagggtcttagagagatgtttcaagacatatcaccaattgaggatttcactggtaacctctctctagagttcattgactacagtttaggagatcctaagtatcccgttgaagagtcaaaagaacgtgatgtgacttactcagctccgctaagagtgaaggttcgtttaattaacaaagaaactggagaggtaaaagaccaggatgtcttcatgggtgatttccctattatgacagataccggtacttttatcatcaacggtgcagaacgtgttatcgtatctcagcttgttcggtctccaagtgtatatttcagtggtaaagtagacaaaaacggtaaaaaaggttttaccgcgactgtcattccaaaccgtggcgcatggttagaatacgaaactgatgcgaaagatgttgtgtatgtccgcattgatcgcacacgtaagttgccggttacggttcttttgcgtgctctcggcttcggttccgaccaagagattctcgatctcattggtgagaacgaatatctccgcaatacactggataaggacaacaccgaaaacagtgacaaagcgcttcttgaaatctatgagcgccttcgtcccggagagccgcctacagtagaaaacgcaaaaagcttgctggattcccgtttcttcgatccgaagcgatacgaccttgcgaatgtaggacgctataaaattaataaaaagcttcatatcaagaaccgcctgtttaaccagcgccttgcagaaacactggtggatccggaaaccggtgaaattctcgctgaaaaagggcagattcttgacagaagaacacttgataaagtattgccatacttagaaaatggaatcggcttcagaaaactttatcctaacggcggcgttgtcgaggatgaagtgatgcttcaatccattaaaatctatgctcctactgatgcagaaggagagcagacgatcaatgtgatcggcaatgcttacatcgaagaggcgattaaaaacattacgcctgctgatattatttcttctatcagctacttcttcaacctcctgcacggagtgggcgacactgatgatatcgaccatctcggaaaccgccgtctgcgttctgtaggtgagctcctgcaaaaccaattccgtatcggtttaagccggatggaacgtgtcgtacgtgaaagaatgtctattcaagacacgaatacaattacgccgcagcagctgattaacatcagacctgttattgcgtctattaaagagttcttcggaagctcacagctttctcaattcatggatcagacgaacccgcttgctgaattgacgcacaaacgccgtctgtcagctctcggaccgggcggtttgacgcgtgagcgcgcaggtatggaagtacgtgacgttcactactctcactacggccgtatgtgtccgattgaaacgcctgagggcccgaacatcggtttgatcaactcattgtcatcatttgcgaaagtaaaccgctttggtttcattgagacgccataccgccgcgttgatcctgaaacaggaaaagtaacgcctagaatcgactacctgactgctgatgaagaggataactatgtcgtagcccaagcgaatgctaagctgagcgatgacggttctttcttggatgacagcatcgtagcgcgtttcagaggggaaaacaccgttgtagcccgcaaccgcgtggattacatggacgtatctcctaaacaggttgtttctgctgcgacagcatgtattccgttcttggaaaacgatgactcgaaccgcgccctcatgggagcgaacatgcagcgtcaggctgtgcctttgatgcagccggaagctccgatcgtcggaacgggtatggaatacgtatccggtaaagactccggtgcagccgttatttgtaaacaccctggtatcgtagaacgggtggaagcgaaaaacgtatgggtgcgccgctatgaagaaattgacggccaaaaagtaaaaggcaacctggataagtacagcttgctgaaatttgtccgctccaaccaaggtacgtgctacaaccagcgtccgattgtaagtgtcggcgatgaagtagtcaaaggagaaatccttgctgacggaccttcaatggagcttggtgaacttgctctcggccgcaacgtaatggtcggcttcatgacatgggacggttacaactatgaggatgccatcatcatgagtgaacgccttgtgaaagatgatgtatacacatctattcacattgaagaatatgaatcagaagcacgtgatacaaagcttgggccggaagagatcacccgcgatattccaaacgtaggggaagacgcgcttcgcaaccttgatgaccgcggaattatccgtatcggcgcggaagtcaacgacggagaccttctcgtaggtaaagtaacgcctaaaggtgtaactgagcttacggctgaagaacgccttcttcatgcgatctttggagaaaaagcgcgtgaagtccgtgatacttctctccgtgtgcctcacggcggcggcggaattatccacgacgtaaaagtcttcaaccgtgaagacggcgacgaacttcctccgggagtgaaccagcttgtacgcgtatatatcgttcagaaacgtaagatttctgaaggtgataaaatggccggacgtcacggaaataaaggggttatctcgaagattcttcctgaagaagatatgccttaccttcctgacggcacgccgatcgatatcatgcttaacccgctgggtgtaccatcacgtatgaatatcggtcaggtattagaacttcacatgggtatggctgcccgctacctcggcattcacatcgcgtcacctgtatttgacggcgcgcgtgaagaagatgtgtgggaaacacttgaagaagcaggcatgtcaagagacgctaaaacagttctttatgacggccgtacgggagaaccgttcgacaaccgtgtatcagtcggaatcatgtacatgatcaaactggctcacatggttgacgataaacttcatgcccgttctacaggtccttactcacttgttacgcagcagcctctcggcggtaaagcccaattcggcggacagcgtttcggtgagatggaggtttgggcgcttgaagcttacggcgcagcttacacgcttcaagaaatcctgactgtgaagtccgatgacgtggtcggacgtgtgaaaacatatgaagccatcgtcaaaggcgacaatgttccagagcctggtgttccggaatcattcaaagtattgatcaaagagcttcaaagcttaggtatggacgtaaaaatcctctcaggcgatgaagaagaaatagaaatgagagatctagaagacgaggaagatgcgaaacaggctgacggccttgcattatcaggtgatgaagcgccggaagaaacagcatctccagacgttgaacgtgacgcagtaacgaaagaatagtctctgattgataaaggcaagtgacatcggttaatccgaagataaaaagggaggtaggccccttgctagatgtgaacaattttgagtatatgaacatcggtcttgcttcaccggataaaatccgttcatggtcttttggtgaagtgaaaaagcctgaaacgataaactatcgtacgttgaaacctgaaaaggacggcctgttctgcgaacgcattttcggaccgactaaggactgggaatgtcattgcggcaagtacaagcgggttcgttataaaggcgtagtttgtgaccgttgcggagttgaagtaacgcgggctaaagtccgtcgtgagagaatggggcatattgaactggctgccccggtttctcacatttggtatttcaaaggtattccgagccgtatgggtcttgtattggatatgtcaccgcgtgcgctggaagaagttatttactttgcttcttacgtcgtaactgacccggccaatacaccgctcgaaaagaaacagcttttatctgaaaaggaataccgtgcgtatctggataagtacggaaacaaattccaagcctctatgggtgcggaagccattaataaacttctgcaggacatcgaccttgtcaaagaagttgatatgttaaaagaagagctgaagacttctcaaggacagcgccgtacacgcgcgatcaaacgccttgaagtgcttgaagccttccgtaattcaggaaacaagccgtcttggatgattctcgacgtgcttccggttattccgcctgaattaagaccgatggttcagcttgacggcggacgtttcgcaacgtctgacctgaacgacctttaccgtcgtgtcatcaaccgtaataaccgtttaaaacgtctgttagacctcggcgcgccaagcatcatcgttcagaacgaaaaacgtatgcttcaggaagcagtcgacgctctgattgacaacggacgccgcggccgtccggttaccggaccgggtaaccgtccgcttaaatctctttctcacatgctgaaagggaaacaagggcgtttccgtcagaaccttctcggtaaacgtgtagactactcaggccgttccgttatcgtcgtaggtccgcatctgaaaatgtatcagtgcggtttgccgaaggaaatggcgcttgagctcttcaagcctttcgtcatgaaagagcttgttgaaaaaggccttgctcacaatatcaagagcgcaaaacgcaaaatcgaacgcgtgcagcctgaagtatgggatgtacttgaatctgtcattaaggagcatccggtcttactgaaccgtgcccctactcttcacagattaggtatccaggctttcgaaccgacgcttgttgaaggacgcgccatccgtcttcacccgttagtatgtacagcttataacgctgactttgacggtgaccaaatggcggttcacgtacctttatcagctgaggctcaagctgaggcgcgcattctgatgcttgcggcccaaaacatcttgaaccctaaagatggtaaaccggttgttacgccgtctcaggatatggtattaggaaactactacctgacgcttgagcgcgccggagcagtcggcgagggtatggttttcaaaaatacggacgaagcgcttcttgcttatcaaaacggttatgttcatcttcatacgagagtagctgttgcagcgaactcccttaagaatgtgacatttactgaagaacagcgttcaaaattgttaattacaactgtcggtaagctcgtcttcaatgaaattcttccggaatcattcccttacatgaatgaaccaacgaagagcaacattgaagagaagacacctgaccgtttcttcttagataaaggtgctgacgtaaaagctgtgattgctgagcagccgatcaacgcaccgtttaaaaaaggtattttgggtaaaatcatcgcggaaatctttaaacgattccatatcacggaaacgtctaaaatgcttgaccgcatgaaaaacctcggtttcagatattcaacgaaagccggcatcacagtaggggtttctgatatcgtcgttctcgatgataaacaggaaatccttgaagaagcacaaagcaaagtagataatgttctgaaacagttcagacgcggtttaatcaccgaagaagaacgttatgaaagagtcatttcaatttggagttcagcgaaagatgttatccaaggcaaactgatgaaatcattagacgaagtcaacccgatctacatgatgagtgattcaggagcccgtggtaacgcatctaactttacacagcttgcgggtatgcgcggtctgatggccaacccggctggacgaatcattgaattgccgattaaatcaagtttccgtgaaggtctgacagtattggagtactttatctccactcacggtgcgcgtaaaggtcttgccgataccgccctgaaaacagctgactcaggttaccttacacgccgtcttgttgatgttgcgcaggatgttatcattcgtgaaacagattgcggaacagaccgcggtattcttgcaaaaccgctcaaagaaggcacggaaatcatcgagcgtctggaagagcgtctgatcggacgtttcgccagaaaacagatcaaacatcctgaaacgggtgctgtgctcattaacgaaaatgaattgatcgatgaagataaagcgctggaaatcgttgaagccggaatcgaagaagtgtggatccgttctgcgttcacatgtaacactcctcatggtgtatgtaaacgatgctacggacgaaaccttgcaaccggaactgatgttgaagtcggcgaagcagtaggtattatcgccgctcaatctatcggtgagcctggaacacagttaacgatgcgtacgttccacacaggcggggttgccggagacgatatcacacaaggtcttccgcgtatccaggagcttttcgaagcgcgtaatccgaaaggtcaagcgacgatttctgagattgacggtacaattgccgaaatcaatgaagtccgcgacaaacagcaggagattgttgttcagggtgctgttgagacccgttcatacacggcaccttacaactcacgcctgaaagtgactgagggtgatcagattacccgcggtcaagtgctgacggaaggttcaatcgatccgaaagaacttcttaaagttactgacctgacaacggttcaggaatatcttctgcatgaggttcagaaggtttaccgtatgcagggggttgaaatcggcgataaacacgtagaagtaatggttcgccagatgcttcgcaaagtccgtgtaatcgatgccggagatactgatgttctccctggcacattgcttgatattcaccaatttacagaagcgaacaaaaaagtgctgcttgaaggcaatcgacctgctacaggccgtcctgtccttctcggtatcacgaaagcttcacttgagacggattcattcttgtctgccgcatcattccaggaaacaacacgcgttcttacagatgctgcgattaaaggcaagcgtgatgaacttctcggcctgaaagagaatgtcatcatcggtaaactggttccggccggtacaggtatgatgaattacagaaaagtaaaacctgtttcaaacgttcagccttcggaagatatggttccggctgaataacagaaactgctgcaggaaaggctgtttcgacagcttttcctcagtattacaattattctggcggggactgcactaaaaaatgtcatacgttgttgacatccgtcccgcagagtgataatataaccaaggtgctcgaaataaaacctgttactttggaggatatgtttatgtcttatgataaagtatcacaggccaaatcaattattattggtacgaagcaaacagtgaaagctctaaaacgaggttcagtgaaggaagtcgtcgtggcaaaagacgcggattcagttcttacggctggcgttatccagcttgcaaagaaccaaaataccgctgtctgtatggtggattccatgaaaaagctcggcaaagcctgcggaattgaagtgggagcagcagctgttgccattatgttatagcgtactttttgtttttatataagatatcaatcttatgtaaagacattgtttttttgcctaatgatgaaccacctgggtatgtgggttataaaacgtaatgaagggaggaacacaacatgcctacaattaatcagctaattcgcaagggacgcgtgagcaaagttgaaaactctaagtcacctgcactaaacaaaggatacaacagctttaaaaaagagcacactaacgtatcttctccacaaaaacgcggggtatgtactcgtgtcggtacaatgacaccgaaaaaaccgaactcagcacttcgtaaatatgctcgtgttcgtttgactaacggaatcgaggttactgcctacattcctggtatcggtcacaacctgcaagagcacagcgttgtactgatccgcggcggacgtgtaaaagacttaccgggggtacgctaccacatcgttcgtggcgcgcttgatactgccggagttgaaaaccgtgcgcaaggccgttctaaatacggtacgaaacgtcctaaagcaaagtaataataataaatcattaaaactatgaagggaggatattcagatgccacgtaaaggtcctgtagcaaaaagagatgttttacctgatccgctttacaactctaagctggtatcccgcctgatcaacaaaatgatgatcgacggtaaaaaaggtaaatctcaaacaatcctatacaagtcattcgatatcattaaagaacgcactggcaatgatgcaatggaggttttcgaacaagcattgaaaaacatcatgcctgtacttgaagtaaaagcacgccgtgtaggtggagctaactaccaagtgcctgtagaagttcgtcctgaacgccgtacaactcttggtcttcgctggttggttaactatgcgcgtcttcgcggagaaaaaacaatggaagagcgcctggctaacgaaattcttgatgcagctaacaacactggtgctgccgttaagaaacgtgaagacactcacaagatggcagaagcgaacaaagcatttgctcactaccgctggtaggattcatataatcaaaataataattccctaataaggaaggagaaattacccaatggcaagagagttctccttagaaaaaactcgtaatatcgggatcatggctcacatcgatgccggtaaaacgactactacagaacggatcttgttctacacaggccgtatccacaaaattggcgaaactcacgaaggtgcttcgcaaatggactggatggagcaggaacaagagcgcggtatcacaatcacttctgcagcaacgactgcacagtggaaaggttaccgtgtaaacatcatcgatacaccgggacacgtagacttcacagttgaagttgaacgttcactccgtgtacttgatggtgcggttgccgtacttgatgctcaatcaggtgttgagcctcagacagaaacagtatggcgccaagcaacaacttacggagtaccgcgcgttgtatttgtcaacaaaatggacaaaatcggcgcagacttcctttactctgtaggcactttaagagaccgtcttcaagctaacgctcacgcaattcaattgccgatcggcgctgaagacaacttcgaaggtatcatcgacttagtagaaaacgttgcgtatttctacgaagatgaccttggaactcgttcagatgcgaaagaaatccctgaagagtacaaagagcaagctgaagagcttcgcagcagcctgattgaagctgtagctgagcttgatgaagagcttatggaaaagtaccttgaaggtgaagaaatcactatccctgaactgaaagctgctatccgtaaaggtacactgaatgttgaattctaccctgtacttgttggttctgctttcaaaaacaaaggtgttcagcttgtacttgatgctgttcttgactaccttcctgcgccaactgatgttgctgcaatcaaaggtgttcgtcctgatacagatgaagagatcgttcgtcattcttctgatgaagagccgttctctgcacttgcatttaaagttatgactgacccttatgtcggtaagctgacattcttccgcgtatattccggtacacttgattccggttcatatgtaaagaactctacaaaaggcaagcgtgagcgcgtaggacgtatccttcaaatgcacgctaacagccgtgaagagatctctactgtttacgctggagacatcgcagctgctgtaggtctaaaagatacttctactggagatactctgtgtgatgaaaaggatcttgtaatccttgaatcaatggaattcccagagcctgttatcgacgtagcgattgagcctaaatcaaaagctgaccaagataaaatgggtatcgctttagcgaaacttgctgaagaagatcctacattccgtacacaaactaaccctgaaacgggtcaaacaatcatctctggtatgggtgagcttcaccttgatatcattgttgatcgtatgaagcgtgagttcaaagttgaagctaacgttggtgctcctcaagttgcgtaccgtgagacattccgtaccggtgcaaaagttgaaggtaaattcgtacgtcaatcaggcggacgcggtcagttcggtcacgtttggatcgaatttgaaccgaacgaagaaggcgctggctttgaattcgaaaacgcaatcgtcggtggtgttgttcctcgtgaatacatcccagccgtacaagcaggtcttgaagactctcttgaaaatggtgtcctagccggattcccgctaatcgacatcaaggcgaaactttttgatggatcttaccatgatgttgactcaaacgaaatggcgtttaaagtcgctgcttctatggcattgaaaaatgcagtcagcaaatgtaacccagttcttcttgaaccaatcatgaaagttgaagttgttattcctgaagaatacatgggagacatcatgggtgatgttacttctcgtcgcggacgcgtagaaggtatggaagctcgcggtaacgctcaagttgtgcgtgcgatggtacctcttgctgaaatgttcggttacgctactgcccttcgttctaacacgcaaggacgcggtacgttcacaatgttcatggatcactacgaagaagtgccgaagagcatcgctgaagaaattatcaaaaaaaataaaggcgaataattgattttgccacttaactcaagtataactactattgtaagatgaggaagtgagagcttgctttcactttctatcactctatacattactaattaaaagctcttaaggaggattttagaatggctaaagaaaaattcgaccgttccaaatcacatgccaatatcggtacaattggacacgttgaccatggtaaaacaacattaactgctgctatctcaacagtacttcataagaaatctggtaaaggtacagctatggcgtacgatcaaattgatggtgctccagaagaacgtgagcgcggtatcacaatctctactgcacacgttgagtacgaaactgacactcgtcactatgcacacgttgactgcccaggacacgctgactatgttaaaaacatgatcactggtgctgcgcaaatggacggagctatccttgtagtatctgctgctgatggcccaatgccacaaactcgtgagcacatccttctttctaaaaacgttggtgtaccatacatcgtagtattccttaacaaatgcgacatggtagacgacgaagagcttcttgagcttgttgaaatggaagttcgcgatcttcttagcgaatacgacttccctggtgatgatgtaccagttgttaaaggttctgctcttaaagctcttgaaggcgatgctgagtacgaagaaaaaattcttgaacttatggctgcagttgatgagtacatcccaactccagaacgcgacactgaaaaaccattcatgatgccagttgaggacgtattctcaatcactggtcgtggtacagttgctactggccgtgtagaacgcggacaagttaaagtcggtgacgaagttgaaatcatcggtcttcaagaagaaaacagcaaaacaactgttacaggtgttgaaatgttccgtaagcttcttgactacgctgaagctggagacaacatcggtgcacttcttcgcggtgtagctcgtgaagacatccaacgtggacaagtacttgctaaaccaggtacaatcactccacacagcaaattcaaagctgaagtttacgttctttctaaagaagagggtggacgtcatactccattcttctctaactaccgtcctcagttctacttccgtacaactgacgtaactggtatcatcaatcttccagaaggcgtagaaatggttatgcctggagataacactgaaatgatcgttgaacttatctctacaatcgctatcgaagaaggaactcgtttctctattcgtgaaggcggacgtacagttggttcaggcgttgtttctacaatcactgagtaatcgactcgttcaataatgcggggtcccttatggggcctcgtttttttgtttccctgctgattccatgtataatagaacgtatacaaattttaggagcagaccgatgaacgataacttcaagaaaaccaatcgtatttcaatgcttcagcaattgcagattaatggcagtgaacaaaccattatgattaatggtgatgacaggagtagtccgctgcttttgtttttgcatggcggtcccggcacgcctcaaatcggttatgcgagaaaataccagaatgagctggaaaagcatttcaccgttgtgaactgggatcagagaggggcgggtctctcttattcaaaggaaattccgggttcatctatgactttggatcagctgacagctgacaccattcatctgaccgaacgcttatgcaagcaattcagcaggagaaaaatatatatcgccggctattcgtggggttcagttttggcgcttcaagttcttcaagagaaacctgatttgtattatgcgtatatcggtatcagtcaggtggttaatattcaaaaggaagaaacggaagcctaccggttgatgatggaatggagcaggcaacacaaacatatcctgctgggcaagacgctgagctttatcggagcaccccatgggagaaacagctgcagcgaacgctgtttctgctttgtattgaaatgaggggagggggctttacccatcatccgatcggcgctcttaaagcaggggggcgaatgctgtttggtgaaccgtacggtgtgagagggagcttcttagccgcgcggggacaaatgttcagcctgaaacacctgtgggaggatctcatttcctttgatgcaggggaatcagtttcttctattgtaataccgtgctgttttatgtcagggagatacgatttgacggttccggggacgacgtcttatgaatattatcagaaggttgatgcgccgtataaagaatggcattggtttgagaactcagcccattcgcctcacttggaggaaccggatcgctttgccgaagttgtcagccggttcgcatcgttccatctctgaaagaaaacagtcatatccttgattaatcatggtatcacctgtataataatcaaagtgtgaaaaccacaaggttctttaaataaaccttgcaacatgcgtctattttctgtataatagtgtatgttggtctttgactgcgatgaagtgagaggttgctgacacacccggccgctttgccatggcaaggtgatcaggtttttctcacggagaactgtctaacgtgatgtaggcgaaaaggagggaaaataatggcaaaacaaaaaattcgtattcgtttaaaagcatatgatcatagaatccttgatcaatctgcagagaagattgttgaaacggcaaaacgttctggtgccagcgtatctggtccgattccgttgccgactgaaaaatcagtttacacaatccttcgtgcggtgcacaaatacaaagattctcgtgagcaatttgaaatgcgtacacataaacgtttaatcgacattgtgaacccaacaccacaaactgttgatgctctcatgcgattagacttaccatctggtgtcgatatcgaaatcaaactttaattctaaaatatagaatgatcttaataggaggtgtgacgaatgaccaaaggaatcttaggaagaaaaattggtatgacgcaagtattcgcagagaacggtgatcttatcccggtaactgttattgaagcagctccaaacgttgttcttcaaaagaaaacagctgaaaatgatggctatgaagcgatccagcttggttttgacgataagcgcgaaaagctttcaaacaaaccggaaaaaggacacgttgcaaaagcggaaactgctcctaagcgcttcgttaaagaattacgcggcgtggatatggatgcgtatgaaattggtcaggaagtcaaggttgaaattttctctgcaggagaaatcgtagatgtaacaggagtatctaaaggtaaaggtttccaaggtgcaatcaagcgccacggacaatctcgcggacctatgtctcacggttcacgctaccaccgtcgtcctggttcaatgggacctgtagatcctaaccgtgtattcaaaggtaaactattacctggacgcatgggcggagatcaaatcactgtccaaaaccttgaagtcgtaaaagtagatgctgagcgcaatcttcttttgattaaaggtaacgtacctggtgcgagaaaagctttaatcactgttaaaagtgctgttaaatctaaataagtctcttaggaaaggaggaaattgatcatgccaaaagtagcattatacaaccaaaacggttctactgctggtgatatcgaattaaacgcttctgtatttggaattgagccaaatgagagcgtagtattcgacgctattcttatgcaaagagcttccttacgtcaaggatctcacaaagtaaaaaatcgttctgaagtacgcggcggaggtcgcaaaccatggcgtcaaaaaggtacaggtcgtgcccgtcaaggttcaatccgttcaccgcaatggcgcggaggtggtgtcgtattcggcccaacaccacgcagctattcttacaaattacctaaaaaagttcgccgcttggcaatcaaatcagtattgtcttctaaagtgaacgacaacaacattattgttcttgaagatcttactcttgatacggttaaaacaaaagaaatggcagctgtccttaaaggattatctgttgagaaaaaagctttaatcgtaactgcggatgcaaacgaagcagtatctctttctgcacgcaacatccctggagttacagttgttcaagctaacggaatcaacgtgttagacgttgtcaaccacgagaagcttctgattacaaaagctgcggttgaaaaagtagaggaggtgcttgcataatgaaagatcctcgtgatgttcttaagcgccccgtcattactgaacgttctgctgatttaatgactgaaaagaaatatacttttgaagttgatgtaagagctaataaaacagaagtgaaagatgcagttgaaagtatctttggagtgaaagttgacaaagtcaacatcatgaactacaaagggaaatcaaaacgtgtcggccgctatactggtatgactagccgtcgcagaaaagcgatcgtaaaacttactgcagacagcaaagaaatcgaaatttttgaagcttaattatctgtaaaaagaaggagggaaattcaaaatggcgattaaaaagtataaaccgacctctaacggacgtcgtggcatgacaacttcagattttgctgaaatcacgactgaccagccggaaaaatccttgcttgcgccccttcacaaaaaaggcggacgtaacaaccaaggtaaattgactgtacgtcaccaaggtggcggacacaaacgccaataccgtgttatcgacttcaaacgcgataaagatggtatacctggacgcgttgctacagttgagtacgatccaaaccgttcagctaacattgcactaatcaactatgtagacggagaaaaacgttacattcttgctccaaaaggaattcaagtaggtactgaaatcatgtccggccctgaagctgacatcaaagtaggtaacgcacttccgcttatcaacatccctgttggtacagttgtgcataacattgaattaaaacctggtaaaggcggacagcttgtacgttcagctggtacatctgctcaggttcttggtaaagaaggcaaatacgttcttgtacgtcttaactctggtgaagttcgcatgatcctttctgcttgccgcgcttctatcggtcaagtaggtaacgagcagcacgaacttatcaacgttggtaaagcaggacgctctcgctggaaaggcatccgccctacagtccgcggttctgtaatgaaccctaacgatcacccgcacggtggtggtgaaggtcgcgcgccaatcggacgtaaatcaccaatgtctccttggggcaaaccgactcttggattcaagacacgtaagaaaaagaacaaatctgataaatttatcgtacgtcgtcgtaaaaataaataacggggttgtctacggttcatttcggaccgtagtgcaatcacgaagggaggttccaaaatggctcgcagcttgaaaaaaggaccatttgtcgatggacacttgatgacaaaaatcgagaaattaaatgaaacggacaagaaacaagttgtaaaaacttggtctcgccgttcaactattttcccacaatttatcggtcacactatcgcagtatatgacggacgtaaacacgtgcctgtattcatttctgaagacatggtaggccacaagttgggcgaattcgcaccgactcgtacttacaaaggccacgccagtgacgataaaaaaacaagacgctaagagaggaggcttttaaatgcaagctaaagctgttgcaagaacagtccgtattgctcctcgtaaagcacgtctagtaatggacctgattcgaggtaagcaagtaggcgaagcagtatctatcttgaacctaactccgagagctgcttctccgatcatcgaaaaagttttaaaatctgctatcgcaaatgctgagcacaactacgagatggacgctaacaatctggttatttctcaggcatttgttgacgaaggcccaacgttaaaaagattccgcccgcgtgctatgggacgtgcgagccaaatcaacaaacgtacgagccacattacaatcgttgtatcagaaaagaaggagggataagtagtgggtcaaaaggtaaatccagtcggtcttcgtatcggagtcattcgtgattgggaatctaagtggtacgctggtaaagattacgctgacttcctgcacgaagatttaaaaattcgtgaattcattagcaaacgcctttctgacgcttctgtttctaaagtagaaatcgagcgtgcagcaaaccgcgttaacattacgatccacactgctaagcctggtatggtaatcggtaaaggcggatctgaagttgaagcacttcgtaaagcccttaacagccttactggcaagcgtgtacacattaacattcttgaaatcaaaagagcagatcttgatgctcagcttgtagctgacaacatcgctcgtcaactagaaaaccgtatttctttccgccgtgcgcagaaacaacaaatccaacgcactatgcgtgctggagcacaaggtgtgaaaacaatggtttccggccgtcttggcggagctgatatcgctcgttctgaatactacagtgaaggaactgttccattgcacactttacgtgctgacatcgactatgcaacatctgaagctgacacaacttacggtaagcttggtgtaaaagtctggatctatcgtggagaggttcttcctactaagaagaaaactgaggaaggaggaaaataatatgttattaccaaaacgcgttaaatatcgcagagagcatcgcggaaaaatgcgcggtcgcgctaaaggcggtactgaagtacattttggtgagtacggtatccaggctcttgaagcttcttggatcacgaaccgccaaatcgaagctgcacgtattgcgatgactcgttacatgaaacgtggcggtaaagtttggattaaaattttcccttcaaaaccttacactgctaaaccgcttgaggtacggatgggttccggtaaaggggctcctgaaggctgggtagctgttgtaaaaccgggcaaagttttatttgaaatttctggtgtgtctgaagaggtagctcgtgaagctctccgtcttgcatctcacaaattgccaattaaaacgaagttcgtaaaacgtgaagaaattggtggtgaatcaaatgaaagctaatgaaattcgtgaccttaccactgctgaaattgaacaaaaagtaaagtctcttaaagaagaacttttcaatcttcgctttcaattagcgacaggacaacttgaaaatactgctcgcattcgtgaagtgcgcaaagctatcgcgcgcatgaaaactgtgattcgtgaaagagaaattgctgccaacaaataatcactgaggggaggtcgtgagcatgagcgaacgtaaccaacgcaaagtttaccaaggccgtgttgtttctgacaaaatggataaaaccatcactgttgttgttgaaacatacaaaaaggatcctatttacggtaaacgcgtaaaatactcaaagaaattcaaagcacatgatgaaaataaccaagctaaaatcggagacatcgtaaagatcatggaaactcgtccattatctgcaactaagcgttttcgtctagtagaagttgtcgaagaagctgttattatctaataaagttcggaattctttttccgaagggaggtaacaaataatgattcaacaagagactcgtttaaaagttgctgacaactccggtgcgcgtgaggtacttactattaaagttcttggcggttctggacgtaaaacggctaacattggtgatgtaattgtttgcacggttaaacaagcaacaccaggaggcgttgtcaaaaaaggtgaagtcgtaagagctgttatcgttcgcacaaaaagcggagcacgcagatctgacggatcatacatcagcttcgatgagaatgcatgtgttatcatccgtgacgacaagagcccgcgtggaactcgtatcttcggaccggttgcccgtgaattacgtgaaaacaacttcatgaaaattgtttctctggctccagaagttatctaatgaaataaatgccttactcaaggaggtgcgatcaggatgcatgtgaaaaaaggcgataaagtaatggttatctctggtaaagataaaggcaaacaaggtacgatccttgctgctttccctaaaaaggaccgcgttctagttgagggcgtaaacatggtgaagaagcactctaaaccaactcaagcaaaccctcaaggcggtatttctaatcaagaggcgccaattcatgtatcaaacgttatgccgctcgatcctaaaactggtgaagtgactcgcgtaggatacaaagtggaagatggcaaaaaagttcgtgttgcaaaaaaatctgggcaagtcttagataaatagtatttaaaggaagggaggtctatctcatgaaccgccttaaagaaaagtacaataaagaaatttcacctgctttaatgacgaagttcaactacgactctgttatgcaggtgccaaaaatcgaaaaaatcgtaatcaacatgggtgtcggtgatgctgttcaaaacgcaaaagcaatcgacagtgctgttgaagaattaacgtttatcgcaggtcaaaaacctgtcgttactcgtgcgaagaaatcaattgctggattccgtcttcgtgagggaatgcctatcggtgcgaaagtaactcttcgcggagagcgcatgtatgatttccttgataaacttatttctgtatctttaccgcgtgtacgtgacttccgcgggatttctaagaaatctttcgacggtcgcggaaactacactcttggtatcaaagaacagttaatcttccctgaaattgactacgataaagtaacaaaggttcgcggaatggacatcgttatcgtaacgactgctaactctgacgaagaggctcgtgagctattaactcaagtaggtatgccgttccagaaataatcaatgaaagggaggcgaaatcgtggctaaaaagtcaatgattgcgaaacaacaacgtacaccaaagtttaaagtgcaagagtacactcgctgtgaacgctgcggacgtccgcactcagtcattcgtaaatttaaactttgccgtatttgtttccgtgagcttgcatataaaggacaaattcctggcgtgaaaaaagccagctggtaatccccaagaatgggaaggaggtaattatataatggttatgacagatccaattgcagatatgctgactcgtattcgcaatgcaaacatggtacgtcatgagaagcttgaaattcctgcttctaaattgaaaagagaaattgctgacattttaaagcgtgaaggtttcattcgtgacgttgagttcgtagaagacagcaaacaaggtatcatccgcgttttcttgaaatacggacaaaacaacgagcgcgttatcactggtcttaaaagaatcagcaaaccaggtttgcgtgtatacgctaaatcaaatgaagtacctcgcgtacttaacggtcttggaatcgcgattatttctacatcacaaggtgttttaacggacaaagaagcccgtgcaaaacaagctggtggagaagttctagcatacgtttggtaagaagtttaacaagaatggaggtgttttagtatgtctcgtgtaggtaaaaaactgcttgagatcccttctggagttacagtaacgctgaacgaaggcaacactgtagctgtaaaaggaccaaaaggagaattaactcgtactttccatcctgatatggaaatcaaaattgaggacaacgtgcttacagttactcgtccttctgatcacaaagagcaccgtgcgctgcatggtacgactcgcagtctgcttggaaacatggttgaaggcgtatctaaaggatttgaaagaggtttggaattagtcggtgtcggttatcgtgcggctaaatccggaaacaaacttgttttaaacgttggatactctcaccctgttgagatcgttcctgaagagggcatcgaaatcgaagttccttctcaaactaaagtagttgtaaaaggtacagacaaagagcgtgtaggagctatcgctgctaacatccgcgctgtacgttctccagagccttacaaaggtaaaggaatccgctacgaaggtgaagttgttcgccgtaaagaaggtaaatctgctaagtaagaccgcttaaagtgaagaaaggagtgacctaaggatgattacgaaaactagcaaaaatgctgctcgtcaaaaaagacatgcccgtgttcgtgctaaactttcaggcacagctgaaagacctcgtctgaatgtgttccgttcaaacaaacacatttatgctcaaatcatcgatgatgtaaatggcgttacacttgctagtgcctctactcttgataaagatttgaacgtggaaagcactggtgacagcgctgctgctgctaaagtcggtgaactcgttgcgaaacgcgcttctgagaaaggtgtttctgacgtagtatttgaccgcggcggatacttataccatggacgtgtaaaagctctggccgatgcagctcgtgaagccggactgaaattttaataaaaaaaggagggacacatgattatgcgtcgtattgacccaagcaaattagagttagaagaacgcttagttacggttaaccgcgtagcgaaagttgttaaaggtggtcgtcgtttccgtttcgcagctctagtcgttgtcggtgacaaaaacggtcacgtaggtttcggtactggtaaagcacaagaagtacctgaagcaatccgcaaagctgttgaagatgcgaaaaagaatttgattgaagtaccaatggttggaactacgattccacacgaaatcatcggacgtttcggtgcaggcaatatcttgttgaaacctgcttctgaaggtactggagttatcgctggaggccctgtacgtgcggtacttgagcttgctggcgttgctgatatcctttctaagtctttaggttctaacacaccgatcaacatgatccgtgcaacacttcaaggtttaagtgagcttaaacgtgccgaagaggttgcgaagcttcgtggaaaatctgtagaagaactgttaggataaggagggaacattaatggctaaattagaaattaccctcaaacgcagtgtaatcggtcgcccggaagatcagcgcgttactgtaagaacacttggtttaaagaaaacaaaccaaactgtcgttcatgaagataacgctgcgatccgcggtatgattaataaagtatctcatctagtttctgttaaagaacaataaaaataaattataggctaaggaggtgtcctaatgaaacttcatgaattaaagccttcagaaggttcacgtaaagtacgcaatcgcgtaggtcgtggtattggttctggtaacggtaaaacagctggtaaaggtcacaaaggtcaaaacgctcgttctggcggcggtgtacgccctggattcgaggggggacaaatgcctttattccaacgtcttcctaagcgcggttttacaaacatcaaccgtaaggaatacgctattgtgaacgtagacaaattgaacggttttgcggaaggaacggaagtcactcctgaacttcttcttgagactggtgttattagcaaacttaatgcaggagtaaagattcttggcaacggtaaattagagaaaaaattaactgtaaaagccaataaattctctgcttctgcgaaagaagctgttgaagctgctggcggtacagctgaggtgatctaacttgtttaagacaatctccaactttatgcgtgtgagtgatattcggaataaaatcatttttacattactcatgcttatcgtctttcgcataggtgcgtttatccctgtgccatatgtaaatgctcaggcgttgcagacacaaagttcgatgggggtttttgatctccttaacacatttggcggcggtgcgctttatcagttctccatttttgcgatgggaattacgccttacatcactgcttcgatcatcattcagctgcttcagatggatgttgtgccgaagtttaccgagtggtctaagcaaggtgaagtcggccgccgtaaattagctcagttcacgagatattttacgattgtgcttggttttatccaggcattaggtatgtcttacgggtttaacaacctggcaaacggtatgctgattgaaaaatccggcatatcgacatatctgattattgctttagtactcactggaggaactgcttttttaatgtggctgggagaacaaattacttccaatggagtaggtaacggaatttcgatcatcatcttcgcggggattgtggctagtattccgaaaactgttgggcagatttatgagactcaatttgtcggcagcagcgatcagctgtttattcatattgtgaaaatcgctttactggtgattgcgattttagccgttattgttggtgttattttcattcagcaggctgtacgcaaaatcgcgattcaatatgcaaaagggcaaggtcgttcacctgttggcggaggccagtcaactcaccttccgcttaaagtgaatccggcaggggttattccggtaatctttgcggttgcgttccttattacgccgcgtactatcgcgtcatttttcggagaaaacgatgtgacaaagtggattcaagccaactttgacaatacacatccggtgggcatgacggtttatgtcgcattaattatcgcctttacgtacttctatgcttttgtgcaggtaaaccctgaacaaatggctgataacctaaaaaaacagggtggctatatcccgggggttcgtccagggaaaatgactcaagatagaattacgagcattttgtatcgacttacgtttgtgggttctatattcttagccgtgatttccattcttcctatctttttcattcaattcgctggattgcctcaaagtgcacagattggcggaacatcattgttaattgtcgtcggggtagccttggagacaatgaagcagctggagagccagttagtgaaacgtaattaccgaggatttatgaaaaattagaggactggttttaaccattcctctaaataagagaggacgggggaaatccgaatgaacttagtcttaatgggacttcctggagccggtaaaggcacacagggagaacgaattgttgaggattatgggatacctcatatctcaacgggagatatgttccgtgctgctatgaaagaagaaacaccactcggactcgaagcaaagtcttatattgataaaggcgagctcgtaccggacgaagtcacaatcggcattgtcaaagaaagactcggcaaagatgattgtgaaagaggttttcttctggacggatttccgcgaacagtcgctcaggctgaagctcttgaaaacattcttgaggaatacggcaagccgattgattatgtcattaacattaaagtagacaaagactctttaatggaacgtttgactggacgcagaatttgcagtgtttgcggcacaacctatcatttggttttcaatccgccgaaaacgccgggtgtttgtgataaagacggaggagacctttatcaacgggcagatgataatgaggaaaccgtctcaaaacggcttgaggtcaacatgaagcagactcagcctttactcgatttttattctgagaaagggtatcttgtcaacgtcaatggccagcaggacattaacgacgtgtacaaagatgtgaaagagcttcttggaggattgagcaaatgattatctgtaagacccctcgtgagcttagcatcatgcgggaagcagggcgaatcgtggctttgactcatgaagagatgaaaaagcacattaaaccaggaatctcgacaaaagaattggatcaaattgccgaacgttttattgagaagcagggtgcaatcccatcttttaaggggtataatgggtttcgcgggagcatctgtgtatcagttaatgaagaactcgttcacggaattcccggtaaaagggttttgcgtgacggtgacattatcagcattgatatcggtgctaaattaaatggttatcatggtgactctgcttggacatatccggtaggaaacatcagtgatgatgataaacgactgctggaagtgacagaggagtctttatataaaggcttgaaggaagcaaaaccaggtgaacgtttgtcgaatatttcccacgcaatacaaacgtatgtcgaaaatgagcagttttcagttgttagggagtatgtcggacatggtgttggtcaagacttgcatgaggatccgcaaattcctcattacggtccgccaaacaaaggacctaggctgaagcctggtatggttctcgctatagaaccgatggttaacgctggcagccggtatgtgaaaacattggctgataactggacggttgtaacggtagatgggaaaaagtgtgctcattttgaacatacgattgcgattacggaaacgggttttgatatactgacaaaagtctagatgatgaaatgaattccatgacacatgtttttcattccgcacctgggcagattgtaggtttacaattggtcggaagaaaaaccggctagctgctgtcatcggaaggaagattcatcatcgtgtactaaagcagacggagaaaagcgtacatttcattctccttagaaaaagaatatcaatcattcaccctttatgattgcgtatctccggaagttcagaacagtataaacgaaacagggcgtgtgacaaacggataactgagattttctcttttgaaatttgtcagagagcaagttactgatttgaagaagggagaacacttgaatggcgaaagacgatgtaattgaagtggaaggtacgattgtcgaaacactgccaaacgcgatgttcaaagttgaactcgaaaatggccatacggttttggctcacgtatctggtaaaatccgcatgcacttcattcgcattttacctggagacaaagttacggtagaattatctccatatgacttaactcgtggcaggattacgtaccgttacaaataaagcactccggaaactgaaggaggttggaaacacatgaaagtgagaccatcagttaaaccaatctgcgagaaatgtaaagttattcgcagaaaaggaaaagtaatggtgatctgtgaaaatccaaagcataaacaaaaacaaggataattaataaggaggtgcccagagaatggctcgtattgctggtgtagatatcccacgtgacaaacgtgttgttatttctttaacatatgtcttcggaattggccgcacaacggctcagcaagtcttgaaagaggctggtgtttctgaagatactcgtgtgcgtgatcttactgaagaagaacttggtaaaatccgtgatgttattgacaaactgaaagtagaaggtgaccttcgccgtgaagtttctcttaacatcaagcgtctgatcgaaatcggaagctaccgcggaatccgccatcgcagaggtttgcctgttcgcggacaaaactctaaaaacaatgcgcgtactcgtaaaggtccgcgtcgtactgtagctaacaagaaaaaataagtaagggaggtacctaaacaatggctgctgctcgtaaacaaaacacgcgtaaacgtcgcgtgaaaaagaatattgagtcaggaatcgctcatattcgttcaactttcaacaacacgatcgttacgatcactgatactcatggtaatgctatttcttggtcaagtgccggagctctaggattcagaggttctcgtaaatcgactccttttgctgcgcaaatggctgctgaaacagctgctaaaggttcaatcgaacacggacttaaaactcttgaagtaactgttaaaggaccaggttctggccgtgaagctgcaatccgtgctttacaagctgccggacttgaagttacagctatcagagacgtaactcctgttcctcataatggatgccgtccaccaaaacgtcgccgcgtgtaatttgtttgtatagattttgtgtccctgtcaataatgggttatgatacagttatttatgaaacgaatgcaccgactcgttgcctgagcacatacgggactaaacaatggggaatttcggatggaatctcatatgattctattcgaggtttcgacgttttgaaggagggttttaagtaatgatcgagattgaaaaaccaaaaatcgaaacggttgaaatcagcgacgatgccaaatttggtaagtttgtcgtagagccgcttgagcgtggatatggtacaactctgggtaactccttacgtcgtatcctcttatcctcactccctggtgccgctgtaacatcgatccagatagatggtgtactgcacgaattctcgacaatcgaaggcgttgtggaagatgttacaacgataatcttgcacattaaaaagcttgcattgaaaatctactctgatgaagagaagacgcttgaaattgatgtacagggcgaaggaactgtcacagcagctgatattacacacgacagcgatgttgaaatccttaatccggatcttcatatcgcgactcttggtgagaatgcgagtttccgagttcgccttactgcacaaagaggacgtgggtatacacctgctgattcgaacaaaagagacgatcagccaatcggcgtgattccgatcgattcaatctttacgccagtttctcgtttatcttatcaggtagaaaacactcgtgtaggccaggttgcaaactatgacaaacttacacttgatgtttggactgacggaagcactggaccgaaggaagcaattgctctcggttcaaagattttaactgaacaccttaatatattcgtcggtttaactgacgaagctcagcatgctgaaatcatggttgaaaaagaagaggatcaaaaagaaaaagttcttgaaatgacgattgaggaacttgatctttctgtccgttcttacaactgcttgaagcgtgcgggcattaacacggttcaagaacttgcgaacaagacggaagaagatatgatgaaagttcgcaacctgggacgcaaatcacttgaagaagtgaaagcgaaacttgaagaacttggactcggccttcgcaaagacgattgatctagtttccatgtgaactaggattttcgtgtgttttttaattagaaacagcattccattaaaggaggggacatcacatgtcatacagaaaactaggacgtacgagttcacagcgtaaagctatgcttcgtgatcttacaacagatttgatcatcaacgaaagaattgaaacaactgaaacacgtgcgaaagaacttcgctctgttgttgaaaagatgatcactcttggtaagcgcggtgacttgcatgctcgtcgtcaagctgctgcatacattcgcaacgaggttgctaatgaagaaaataaccaagatgcacttcaaaaattattctctgacattgcaactcgttacgaggagcgccaaggcggatacacacgtattatgaagcttggtcctcgccgtggtgacggtgcaccaatggcaatcatcgaattggtttaatcacatatttttgtgtatctaaagaagggcgggacagtttctaactggatctatgccctttttttagatatcagaactttttatcatgagacagaaaagcagagctatagctgagaggaggtcaggcgcccgtggatcaaaaacagcttatatccgtaaaagacattctattccgctaccgcaaagatgcagtaagaccggcgctggacggtgtgagtctggaggtatatgaaggagaatggcttgctatcgtaggtcacaacggttcagggaagtcgactttggccagagcgctgaacgggctgattttgcctgaggccggagaaattgaagtcggcggcatcaagctgactgaggataccgtgtgggatgtgcgaaaaaaaatagggatggtctttcagaatcccgataaccaatttgtcggaacgactgttcgcgatgatgtggcttttggtttagaaaacaatggtgttccgcgcgaagaaatgattgagagagtagattgggctgtcacacaagtcaatatgcaggattttcttgatcaagagccgcaccatctctccggaggtcaaaaacaaagagtggcgatcgcgggaattattgccgcgcgtcctgatattatgattttggatgaagcgacatccatgcttgacccgattgggagagaagaagtccttgatactgtcagacgcttaaaagatcagggcatggccaccgtcatttcgataacacatgacctggaagaagccgcaagggcggataggatcattgtgatgaacggcggcaggaaatatgcagagggcacgcctgaagagatttttaaattaaatgaagacttggttcgcatcggtcttgatttgcctttctcattccagctcagcctgcttttgaaagaaagcggactggcgttaacgaaaaaccatctgactcaggaagggctggtgaatgagctgtggacattaaaatcaaagatgtagaacaccgctatcaaatgaagacaccgtttgaacggcttgctctgtatgatatcaatgccgtgataaaagagggcagctacgttgccgtcatcggacatacagggtcgggcaaatcgacgctcctgcagcatttaaacggtttgctgaaaccgactaaaggacagcttgagctcgggagcacgattctggcagccggtaaaaagaataaagaccttaagactctgcgaaaaaaagtcggaatcgttttccaatttcccgaacatcagctgtttgaagagactgtgctgaaggacatcgcattcggaccgatgaatttcggtgtaaaaaaagaagacgctgaacggaaagcaaaagaaatgctggggcttgtgggccttccggaagacattttggatcgttcaccgtttgagctcagcggcggccagatgcgcagagtggcgattgccggcgttctcgcgatggagccggaagtgctggttttggatgaaccgacagccggtcttgatccgagagggcgccaggacattatggacatgttctatgcgcttcatcagcggggaaacctgactaccgttctcgtcacccacagcatggaggacgccgcccgctatgctgacgaaatgatcgtcatgcacaaaggcaccattaaagcgacggggagtccgcgtgacttgtttgtaaaaggtgaagagatggccgaaatgggactggatcttcctgagtcggtgaagtttcagagacggcttgaggaggctctcggagttaagtatgaaaaacccatgctgaccctgcaggatgccgcgagcgaaattaaggctttctttcaggaggaaaaggaccaatgatggacagcatgattatcggaaagtatgttcccggatcatcgcttattcaccgattggacccgcgaacaaaacttgtcagcatctttctttttgtatgtatcgtttttttggcaaacaacgtacaaacgtatgctttgctcggtttgtttacattcggggtgatcgccttaacacgagtgccgttcagctttttgctgaaagggcttaagccgattatctggattgtggcgtttacctttttattacacattttcatgacgcatgaaggatctgtcatttttcagcttggctggtttaaagtgtatgagggcggacttatacaggggatttttatctccctccgtttcgtttaccttatctttatgacaacgctgctgacgctgacaacaacgccgattgaaatcacggatggaatggagcagctcttgaatccttttaaaaaggtgaagctgcccgtacacgaactcgcattgatgatgtcgatatcattgcgatttatcccgacattgatggaagagacagataaaatcatgaaggcgcaaatggcgaggggtgcggactttacaagcggcccggtgaaagacagaatcaaagcggttgttccgctgcttgtcccgctgtttgtcagcgcctttaaacgcgcggaagagcttgcggtcgccatggaggcgagaggctaccagggcggtgaggggagaacgaaatacagaaagctcgtctggaccggaaaggataccggagccattctgctcatcatcgtattagccgtgttattgtttttcttaagaagttagaggtgctgctgaatgagagtgaaatgtaccattgcttatgacgggcatttatttaacggatatcaggttcagcctggaaagcggaccgttcaaagtgaattggaaaaagcgctggccgtcatccataaaacggacggcagggtgcctgtcatctcatcgggccgcacggacagcgatgttcatgctgccgggcaggttattcattttgatacgccgctgtccatcccggctgagaaatggccgtttgcgctcaatgccctgctgcctgatgatattgccgtcaaaacagcagagattgcggatgatgggttccatgcacgatttagcgcagtccaaaaggaatatcgctactttgtatatacggagaaacacccggacgtatttaaacgacattacgcttaccattttgcatatcagcttaatgtgcagaaaatgagggaagcttcaaggcacctcatcgggacacatgatttcacaagcttttgcgcggctgataccgcggttcaggataaggtcagaacgatttacgagctggattggactgagaccggagacggcctgcagatgcggatcaccggaaacggttttctctataatatggtcagaatcattgccggaacgttattggatacaggagctggaaaattttctcccgatgatgtaaaagcaatgctcgaagcgaaggatcgcgaagccgcggggcgcaccgcaccggggcacgggctgtatttatggagcgtttgctatgacaactaaaccaggtgtaacattttcttgacagagtctgcataaagttataagatatcatatggtatgtatttcaaccccacgataagccccggaacttattgtgttgtgaaatagaacgtaacagaagtttatgaaaaaatgacagatcatttaggagggaattaaatgcgtacaacacctatggctaacgcaagtactattgaacgcaagtggttagttgttgatgcagcaggcaagactttaggacgtctttctacagaagttgcatctatccttcgcgggaaacacaaaccgacttacacaccgcacgttgatactggagatcatgtgatcatcatcaacgctgaaaaaatcgagttaactggtaaaaagttaactgataaaatctactaccgtcacacaatgcacccaggcggtctgaaatcaagaacagctcttgaaatgcgtacaaactaccctgagaaaatgcttgagcttgctatcaaaggcatgcttccaaaaggttctctaggtcgtcaaatgttcaagaaattgaacgtataccgtggttctgagcatccacatgaagcacaaaaacctgaagtttacgaacttcgcggttaattaaaaaggaggttaccaatttggcacaggttcaatattacggtactggccgtcgtaaaagttctgtagcgcgtgtgcgcttagttccaggagaaggtcgtatcgtcgttaataatcgtgaaatcagcgagcacattccatctccggctctaatcgaagatatcaaacaaccattaactttaactgaaacagctggtacttatgatgttttagtaaacgtacatggaggcggcttatctggtcaagctggagcaatccgtcacggtatcgctcgtgctttgcttgaagcagatccagaataccgcgcaacacttaaacgtgctggtcttctgactcgtgacgcccgtatgaaagaacgtaaaaaatacggtcttaaaggcgctcgtcgtgcacctcagttctcaaaacgttaatcgttttggatggcaaaaaccacaacttcttggttgtggtttttttgtatttttttctcatatcgaagaggttatccgatgtttttctagaattgtttgttatactctattcattaccaataaggagcgcagttataatgaataagttagtcatacataacagcaaggcatgggataaaaaagtcgaaacaggcaatgaatggacggttgcggttgattctcatacaattggtgaagcgaaaaaaggcaattggagcatcagaatgacccccggaaaagatgtgccggcggattggtttccgcccatagacggtctggaggttctttgtctcgcttcaggaggaggacagcaagggccggtccttgctgctgcaggagcggacgtcaccatctttgacaattcggaaaaacagcttgcgcaagacagaatggttgcccagcgggacggtcttacgcttcggactgtcaaaggcagcatgaatgatctgagctgttttgatgatgagacatttgattttatcgtgcacccggtatcgaattgctttgttgatacggttcttccggtatggaaagaagcttatcgcgtattgaaaaaaggcgggtctttagtctccggttttgtaaatcccgtcgtgttcttatttgatatggatttagagcaggaaggcgtactaaaagtaaagtattccattccgttttcggatgaaaaagatctgagtaagaaaaaggtaaaggaacttattgataatcatgaagcgcttgaattcggccatacgctggaggatcaaattaaaggtcagattgacgcaggctttatggttgccggtttttacgaggacaaaggcggcctcgtgctggatgaatacattaatacatactccgtaacaagaagcattaaaatataaaaacggcatcccgtcagaggtgctgtttttttgcggctttttcctgcggacggctgatcacattagccgaaaccggttctattccaatctctctggcccaaaccgacagttgtcccatgtggtgaatctcatgcgcaaggatgtggcggagaatatcttctttaggaaaggtttggtccatccagtccggcttaacaagatccgcccctttgcgggagaccgcatgaatgacatcctcccgatactgttcagacagctttctgagatcctgaatgctcgtatagtcagactcagcgggtaaaacatcatctttacctaaaatggcacgagcccagctgatctcgacatcaatgatatgaaataaagtccgcaagatgctctccattccgcccgtccgggttttcgtcagttcctcccggctcagcttttcacatatcataaaccactcgtcacgcaccgtccaattgtattgaaacagctttttcatcacgtcacctcagctctttattcttccagttaacatgaaactccttcatttgggaggatttccactatcaacaaagcatgctttttcccttttcctttcaaaataacagtaaaaaggagcgtggctggcaatggcagaagtattatctttttcagacgtgaaacggcagaaggattatgagcttgagaagagtttactaaaggagctgtcactgacgcagatcattcagtccgtaaaagcatgtctcacccctttgtttccctttcttcaagacgaaaacggcattctgagtgaaggatgcatagattttgcaattgaagcgtatttattaggcggccggttcggcgtctttggattttatggtgagtctttgcagagggcgaacgcccgttcggctgaagaagaggaagaactgacggccgatttttttgaatatctttgcaattggacgcatgagcaatattcttccgttgaacaaaaagaaatctatgaagcgtcctgccggtttatcaacagctggtggacggaaggatttctgcaaagagaaaaacaatgtaagctccgcatgaggtaatcataatttcttcccttgtcccatacttattaataacggggacaagcgggagggaaagctatgacaaaaaagctgaaatggctcggttttttacttggctttatcatattattgtgtttattccggtttcaattccataatgatgattcatggcggccgtggagcctgccgctgagcgggaaaatcatctatctcgatccgggacacggcgggccggacggaggcgccacgggaggcagtcaccttgaaaaggacattactctcgaagtggcctccagggtcagagactatttgcaggagcagggagctttggtcattatgacgcgggagacggatactgatttagctcctgaagggacgaaaggctacagcagacgcaaagcggaagatctgagaaagcgcgtggagatcatcaaccgttcagaggcggagctttatatcagcattcatctgaacgccataccgtcaccgagatggagcggcgcccaaagcttctactatggaaaatacgaagagaatgaaaaagtggcaaaatatatacaggacgaattgagaatcaatttggagaatacaacgagaaaggcgaaacggatacacggcatttacttaatgcagaatgtaaccaaaccgggcgccctggtggaaatcggatttctgtccaatcccgcggaagcgaaaaggcttggccagcctaaatatcaggacaaaatcgcttcttccgtgtataagggcgtgttgagatattttacagaaaaaggagaccctcccgagtaaggagggtttttcgccgattctacgtttaatatatggtataataccatttgtaaacgaatacacaaagggtgagggttcgatgataagagaagatgaagtaagaaatatagtcggaaacatgcgcgaaccttttcttcatagaccgctgggagaattggatgccattaaagaagtaaaggtcaagccggaaaaacggcatgtcagtgtaaaaattgcattggcaaaaacggggacggctgaacagatgggcattcagcaggaaatcgtatccgttctgaaagaagcgggtgcggaaactgtgggacttcggtttgaagagctgccggaagaaacattggcgaaattcagccggcctgctgctgaaagcgaaaccctgctgaataggaaacatccgccggtctttcttgcggtggcaagcggaaaaggcggtgtcggcaaatcaacggtttccgtcaacctggccatttctcttgcgcggctcggaaaaaaagtcggcttgatcgacgcggatatatacggattcagcgtgccggacatgatgggtattacagttcgcccgacagttgaaggagaaaaactgcttcctgtcgaaagatttggagtaaaggttatgtcgatgggctttttcgtcgaagaaaacgctccggttgtgtggagagggccgatgctgggcaagatgctgaataacttcttccatgaggttgactggggagaggttgactatatcgttctcgacctgccgcccggcacgggtgatgtggcgctcgatgtacacacgatgcttccgagctgcaaagagattatcgtatcaacgccgcaccctacagccgcatttgtagcggcgagagcgggatctatggcgattaagaccgatcatgaagttgtaggggtcattgaaaatatggcttattatgaaagtgcaaaaaccggcgagagagaatatgtgttcggtcaaggcgggggagataagcttgcagaggaattgcaggtgccgctgcttggcagaattcctttaaaacagcctgattgggacaaggaccagtttgcgccttctgtctatgacagaagtcatccgatcggggaaatttatatgggtatcgcccaaaaagtcattgaaaaaacagctgaataaaaaaggggccgggatcaacacggcccggccttttattggctttctttttcagaacttgaagccgcttttttcaattcatcctcgaattgctttttgaaaagcgggctggaaagtgtctctgtaattacatcttctaagtaactgcggaacttttggcttttcaccagctcatagtattttttatccatgccggggtcctgcatgatctgcataaaacttttctgataatcagggtctttcatcaatttttttatgattttttcgtgctcgggctgaagcgtttttgcaaagctctcggcgaactttgagtcttcaaagatggttttccagaactccgccccttttttagaggtgagggttttctctattgtgcctttaatggcattttgatcaatcaccaatgcctcattcatcgcatcatcatttaatatttccttaattgctttttttccatcatctgtctttaatatatcaacaaccatttttttagtctggtcataatccatatccgctgcttggtcttttggagcacaagctgttacagataatacaacaaaacagcttatcaatagcgttttggcttttgacatgcataagctccttccttacttgtacttatttttaatatgattcatcggaatggatttatacataacaaaatatcgctgaacgcgattgtcaggggatgaataagagatgaaaagccgcgggcttgttcgatttttcttttcgattttagctgtgggcgctcttattacaagcgtcgtgggatttgcactgaagtggggggagtacaaggggttctttctgaattttgaggccggtcaaattttctccgttctgatctggtttatcggggtaggcatgattttcagtgtgatcagccagatgggattcttcgtctttctgacggtgcaccggtttgcccttgaaatcctcagatcaaactcgctttggaatctgcttcagctgtttatcattctgtttgtcgcttttgatttaatgtacgtcagatttttgtttttcggtgagcgggatgactcgattgcggggtttgtctggctgccgctggctctgcttgccgtcggcttgctgacggcgtatataaaacaaaagcagtcctcaaaaaatacgttcgtttcatcattatttttaatggtcgttattacagcgcttgaatgggttcctgcgctaagagtgaataatgaggactggctttatttgatgctgattccgctgatgggctgcaatgcgtttcagctgttaatgctgccgaagtttgcccagaggtagttatttcacttctgatgacttgacgtcagtatttgcgatcaggtcgccgactgtcacgtttttcagtcctttttgctttaaattgtgaatgatggcggggagcgcttcttcggtctgtgttgctgaatcagaggcgtgcagcaggacaatgtcgccgccttttatatgactgtttacattttcaatgattttatcaggaccgggatttgtccaatcctgcgagttaacgctgtaatgaaccactgaatagcggtactgctgtgcaatggcaagaacctttttattaaattgtccggtcggcgggcggagtaaatgaacattcttcacacccagctttttaaatgcggtctgggcccgaaggatatctttttttatttcgttgtcctctaggttggtataattcttatacgcatatcccatgctgccgatttgatgtccgtcttttaccatacgttcaactgtgtccgggtgccgttccgcccaagaagctgacagaaaaaaagtggcgtttttaataccgtttgcttttagcgcgttcagaatcggaaccgctttttcatcgccccagctgatatcgaatgttaatgcgacttcgcccgctttcgtctccccttttgaaatagccttcgggccgctatcagttaaaaatacaggaagggggacggctctctgtatataaaaaaagctggctgctgcaaatgcggcaatgataataataagcagctgttttatccttctgatgtgccacacgtagaagtggttcactggtgacgcctccttatcttgtccatgcttgattacatcgtatgccgcggcggagatgaatataacgaaatacgtttcaaaaaaaaacgaaaaaaatacttgctaaattcagccgatgcatggtatattattaaacgtcgctgatggacagcagacaacaacaaaaagcttcggaaacaacttaaaaaaagttgttgacataaaagaagctgagtggtaagataataaagctgcttcaacaagcggtaatgatctttgaaaactaaacaagacaaaacgtacctgttaattcaaagttttaaataaatcgcacagcgatgtgcgtagtcagtcaaactactttatcggagagtttgatcctggctcaggacgaacgctggcggcgtgcctaatacatgcaagtcgagcggacagatgggagcttgctccctgatgttagcggcggacgggtgagtaacacgtgggtaacctgcctgtaagactgggataactccgggaaaccggggctaataccggatggttgtctgaaccgcatggttcagacataaaaggtggcttcggctaccacttacagatggacccgcggcgcattagctagttggtgaggtaacggctcaccaaggcgacgatgcgtagccgacctgagagggtgatcggccacactgggactgagacacggcccagactcctacgggaggcagcagtagggaatcttccgcaatggacgaaagtctgacggagcaacgccgcgtgagtgatgaaggttttcggatcgtaaagctctgttgttagggaagaacaagtgccgttcaaatagggcggcaccttgacggtacctaaccagaaagccacggctaactacgtgccagcagccgcggtaatacgtaggtggcaagcgttgtccggaattattgggcgtaaagggctcgcaggcggtttcttaagtctgatgtgaaagcccccggctcaaccggggagggtcattggaaactggggaacttgagtgcagaagaggagagtggaattccacgtgtagcggtgaaatgcgtagagatgtggaggaacaccagtggcgaaggcgactctctggtctgtaactgacgctgaggagcgaaagcgtggggagcgaacaggattagataccctggtagtccacgccgtaaacgatgagtgctaagtgttagggggtttccgccccttagtgctgcagctaacgcattaagcactccgcctggggagtacggtcgcaagactgaaactcaaaggaattgacgggggcccgcacaagcggtggagcatgtggtttaattcgaagcaacgcgaagaaccttaccaggtcttgacatcctctgacaatcctagagataggacgtccccttcggggcagagtgacaggtggtgcatggttgtcgtcagctcgtgtcgtgagatgttgggttaagtcccgcaacgagcgcaacccttgatcttagttgccagcattcagttgggcactctaaggtgactgccggtgacaaaccggaggaaggtggggatgacgtcaaatcatcatgccccttatgacctgggctacacacgtgctacaatggacagaacaaagggcagcgaaaccgcgaggttaagccaatcccacaaatctgttctcagttcggatcgcagtctgcaactcgactgcgtgaagctggaatcgctagtaatcgcggatcagcatgccgcggtgaatacgttcccgggccttgtacacaccgcccgtcacaccacgagagtttgtaacacccgaagtcggtgaggtaaccttttaggagccagccgccgaaggtgggacagatgattggggtgaagtcgtaacaaggtagccgtatcggaaggtgcggctggatcacctcctttctaaggattttaacggaatataagacctcgggtcttataaacagaacgttccctgtcttgtttagttttgaaggatcattcgattcttcgagatgttgttctttgaaaactagataacagaagtaattcacattcaattagtaatgcaagatatcacgtagtgattctttttaacggttaagttagaaagggcgcacggtggatgccttggcactaggagccgatgaaggacgggacgaacaccgatatgcttcggggagctgtaagcaagctttgatccggagatttccgaatggggaaacccaccactcgtaatggagtggtatccatatctgaatacataggatatgagaaggcagacccggggaactgaaacatctaagtacccggaggaagagaaagcaaatgcgattccctgagtagcggcgagcgaaacgggaccagcccaaaccaagaggcttgcctcttggggttgtaggacactctgtacggagttacaaaggaacgaggtagatgaagaggtctggaaaggcccgccataggaggtaacagccctgtagtcaaaacttcgttctctcctgagtggatcctgagtacggcggaacacgtgaaattccgtcggaatccgggaggaccatctcccaaggctaaatactccctagtgaccgatagtgaaccagtaccgtgagggaaaggtgaaaagcaccccggaaggggagtgaaagagatcctgaaaccgtgtgcctacaagtagtcagagcccgttaacgggtgatggcgtgccttttgtagaatgaaccggcgagttacgatcccgtgcaaggttaagcagaagatgcggagccgcagcgaaagcgagtctgaatagggcgaattgagtacgtggtcgtagacccgaaaccaggtgatctacccatgtccagggtgaagttcaggtaacactgaatggaggcccgaacccacgcacgttgaaaagtgcggggatgaggtgtgggtaggggtgaaatgccaatcgaacctggagatagctggttctctccgaaatagctttagggctagcctcaaggtaagagtctcggaggtagagcactgattggactaggggcccctaccgggttaccgaattcagtcaaactccgaatgccgatgacttatccttgggagtcagactgcgagtgataagatccgtagtcgaaagggaaacagcccagaccgccagctaaggtcccaaagtatacgttaagtggaaaaggatgtggagttgcttagacaaccaggatgttggcttagaagcagccaccatttaaagagtgcgtaatagctcactggtcgagtgactctgcgccgaaaatgtaccggggctaaacgtatcaccgaagctgcggactgttcttcgaacagtggtaggagagcgttctaagggctgtgaagcaagaccggaaggacttgtggagcgcttagaagtgagaatgccggtatgagtagcgaaagaggggtgagaatcccctccaccgaatgcctaaggtttcctgaggaaggctcgtccgctcagggttagtcgggacctaagccgaggccgaaaggcgtaggcgatggataacaggttgatattcctgtaccacctcctcaccatttgagcaatggggggacgcaggaggatagggtaagcgcggtattggatatccgcgtccaagcagttaggctgggaaataggcaaatccgtttcccgtgaaggctgagctgtgatggcgagcgaattatagtagcgaagttcctgattccacactgccaagaaaagcctctagcgaggtgagaggtgcccgtaccgcaaaccgacacaggtaggcgaggagagaatcctaaggtgatcgagagaactctcgttaaggaactcggcaaaatgaccccgtaacttcgggagaaggggtgctctgttagggtgcaagcccgagagagccgcagtgaataggcccaggcgactgtttagcaaaaacacaggtctctgcgaagccgtaaggcgaagtataggggctgacgcctgcccggtgctggaaggttaagaggagcgcttagcgtaagcgaaggtgcgaattgaagccccagtaaacggcggccgtaactataacggtcctaaggtagcgaaattccttgtcgggtaagttccgacccgcacgaaaggcgcaacgatctgggcactgtctcaacgagagactcggtgaaattatagtacctgtgaagatgcaggttacccgcgacaggacggaaagacccgtggagctttactgcagcctgatattgaatgttggtacagcttgtacaggataggtaggagccttggaaaccggagcgccagcttcggtggaggcatcggtgggatactaccctggctgtattgaccttctaacccgccgcccttatcgggcggggagacagtgtcaggtgggcagtttgactggggcggtcgcctcctaaaaggtaacggaggcgcccaaaggttccctcagaatggttggaaatcattcgcagagtgtaaaggcacaagggagcttgactgcgagacctacaagtcgagcagggacgaaagtcgggcttagtgatccggtggttccgcatggaagggccatcgctcaacggataaaagctaccccggggataacaggcttatctcccccaagagtccacatcgacggggaggtttggcacctcgatgtcggctcatcgcatcctggggctgtagtcggtcccaagggttgggctgttcgcccattaaagcggtacgcgagctgggttcagaacgtcgtgagacagttcggtccctatccgtcgcgggcgcaggaaatttgagaggagctgtccttagtacgagaggaccgggatggacgcaccgctggtgtaccagttgttctgccaagggcatcgctgggtagctatgtgcggacgggataagtgctgaaagcatctaagcatgaagccccctcaagatgagatttcccattccgcaaggaagtaagatccctgaaagatgatcaggttgataggtctgaggtggaagtgtggcgacacatggagctgacagatactaatcgatcgaggacttaaccaatttgaatgtatgcttactgttatctagttttgagagaacactctcaatggtttggtggcgatagcgaagaggtcacacccgttcccatgccgaacacggaagttaagctcttcagcgccgatggtagtcgggggtttccccctgtgagagtaggacgccgccaagctttttattttatctaccatgtttttgtttatgaagcttataatattccgcagtagctcagtggtagagctatcggctgttaaccgatcggtcgtaggttcgagtcctacctgcggagccattgcttccatagctcagcaggtagagcacttccatggtaaggaagaggtcagcggttcgagcccgcttggaagcttatctaaaatacgttgatctgaagcagtttccgaatgttatggaactgttattttttgtttagttcagtaaaaacctgttgctgattgtaccagttaaggtgtaggtatttagcgcgtctcctgatgaagcctttcttcaaggatgcaaaagagattaacataattaattgttaaacgatattgacttttatcaaaaccttgatataattacttttgtcataatgaacagtataaataacaatacggtttaccgctatctgaagctgtattctggccatgtattacacttttacttgcggaagtagttcagtggtagaacatcaccttgccaaggtgggggtcgcgggttcgaatcccgtcttccgctccattttatcccaacgggatattgtgaaattgattgcgcccgtagctcaattggatagagcgtttgactacggatcaaaaggttaggggttcgactcctctcgggcgcgccataatattttttaaaatcgggaagtagctcagcttggtagagcacatggtttgggaccatggggtcgcaggttcgaatcctgtcttcccgaccattctcaagctttaaagataatatactggttttctttttttctctttttaaaaaaaatgcttgatttatagagaagcaccgtggtatattattaaacgtcgctgatggacagcagacaacaacaaaaagcttcggaaacaacttaaaaaaagttgttgacataaaagaagctgagtggtaagataataaagctgcttcaacaagcggtaatgatctttgaaaactaaacaagacaaaacgtacctgttaattcaaagttttaaataaatcgcacagcgatgtgcgtagtcagtcaaactactttatcggagagtttgatcctggctcaggacgaacgctggcggcgtgcctaatacatgcaagtcgagcggacagatgggagcttgctccctgatgttagcggcggacgggtgagtaacacgtgggtaacctgcctgtaagactgggataactccgggaaaccggggctaataccggatggttgtctgaaccgcatggttcagacataaaaggtggcttcggctaccacttacagatggacccgcggcgcattagctagttggtgaggtaacggctcaccaaggcgacgatgcgtagccgacctgagagggtgatcggccacactgggactgagacacggcccagactcctacgggaggcagcagtagggaatcttccgcaatggacgaaagtctgacggagcaacgccgcgtgagtgatgaaggttttcggatcgtaaagctctgttgttagggaagaacaagtgccgttcaaatagggcggcaccttgacggtacctaaccagaaagccacggctaactacgtgccagcagccgcggtaatacgtaggtggcaagcgttgtccggaattattgggcgtaaagggctcgcaggcggtttcttaagtctgatgtgaaagcccccggctcaaccggggagggtcattggaaactggggaacttgagtgcagaagaggagagtggaattccacgtgtagcggtgaaatgcgtagagatgtggaggaacaccagtggcgaaggcgactctctggtctgtaactgacgctgaggagcgaaagcgtggggagcgaacaggattagataccctggtagtccacgccgtaaacgatgagtgctaagtgttagggggtttccgccccttagtgctgcagctaacgcattaagcactccgcctggggagtacggtcgcaagactgaaactcaaaggaattgacgggggcccgcacaagcggtggagcatgtggtttaattcgaagcaacgcgaagaaccttaccaggtcttgacatcctctgacaatcctagagataggacgtccccttcgggggcagagtgacaggtggtgcatggttgtcgtcagctcgtgtcgtgagatgttgggttaagtcccgcaacgagcgcaacccttgatcttagttgccagcattcagttgggcactctaaggtgactgccggtgacaaaccggaggaaggtggggatgacgtcaaatcatcatgccccttatgacctgggctacacacgtgctacaatggacagaacaaagggcagcgaaaccgcgaggttaagccaatcccacaaatctgttctcagttcggatcgcagtctgcaactcgactgcgtgaagctggaatcgctagtaatcgcggatcagcatgccgcggtgaatacgttcccgggccttgtacacaccgcccgtcacaccacgagagtttgtaacacccgaagtcggtgaggtaaccttttaggagccagccgccgaaggtgggacagatgattggggtgaagtcgtaacaaggtagccgtatcggaaggtgcggctggatcacctcctttctaaggattttaacggaatataagacctcgggtcttataaacagaacgttccctgtcttgtttagttttgaaggatcattcgattcttcgagatgttgttctttgaaaactagataacagaagtaattcacattcaattagtaatgcaagatatcacgtagtgattctttttaacggttaagttagaaagggcgcacggtggatgccttggcactaggagccgatgaaggacgggacgaacaccgatatgcttcggggagctgtaagcaagctttgatccggagatttccgaatggggaaacccaccactcgtaatggagtggtatccatatctgaatacataggatatgagaaggcagacccggggaactgaaacatctaagtacccggaggaagagaaagcaaatgcgattccctgagtagcggcgagcgaaacgggaccagcccaaaccaagaggcttgcctcttggggttgtaggacactctgtacggagttacaaaggaacgaggtagatgaagaggtctggaaaggcccgccataggaggtaacagccctgtagtcaaaacttcgttctctcctgagtggatcctgagtacggcggaacacgtgaaattccgtcggaatccgggaggaccatctcccaaggctaaatactccctagtgaccgatagtgaaccagtaccgtgagggaaaggtgaaaagcaccccggaaggggagtgaaagagatcctgaaaccgtgtgcctacaagtagtcagagcccgttaacgggtgatggcgtgccttttgtagaatgaaccggcgagttacgatcccgtgcaaggttaagcagaagatgcggagccgcagcgaaagcgagtctgaatagggcgaattgagtacgtggtcgtagacccgaaaccaggtgatctacccatgtccagggtgaagttcaggtaacactgaatggaggcccgaacccacgcacgttgaaaagtgcggggatgaggtgtgggtaggggtgaaatgccaatcgaacctggagatagctggttctctccgaaatagctttagggctagcctcaaggtaagagtctcggaggtagagcactgattggactaggggcccctaccgggttaccgaattcagtcaaactccgaatgccgatgacttatccttgggagtcagactgcgagtgataagatccgtagtcgaaagggaaacagcccagaccgccagctaaggtcccaaagtatacgttaagtggaaaaggatgtggagttgcttagacaaccaggatgttggcttagaagcagccaccatttaaagagtgcgtaatagctcactggtcgagtgactctgcgccgaaaatgtaccggggctaaacgtatcaccgaagctgcggactgttcttcgaacagtggtaggagagcgttctaagggctgtgaagcaagaccggaaggacttgtggagcgcttagaagtgagaatgccggtatgagtagcgaaagaggggtgagaatcccctccaccgaatgcctaaggtttcctgaggaaggctcgtccgctcagggttagtcgggacctaagccgaggccgaaaggcgtaggcgatggataacaggttgatattcctgtaccacctcctcaccatttgagcaatggggggacgcaggaggatagggtaagcgcggtattggatatccgcgtccaagcagttaggctgggaaataggcaaatccgtttcccgtgaaggctgagctgtgatggcgagcgaattatagtagcgaagttcctgattccacactgccaagaaaagcctctagcgaggtgagaggtgcccgtaccgcaaaccgacacaggtaggcgaggagagaatcctaaggtgatcgagagaactctcgttaaggaactcggcaaaatgaccccgtaacttcgggagaaggggtgctctgttagggtgcaagcccgagagagccgcagtgaataggcccaggcgactgtttagcaaaaacacaggtctctgcgaagccgtaaggcgaagtataggggctgacgcctgcccggtgctggaaggttaagaggagcgcttagcgtaagcgaaggtgcgaattgaagccccagtaaacggcggccgtaactataacggtcctaaggtagcgaaattccttgtcgggtaagttccgacccgcacgaaaggcgcaacgatctgggcactgtctcaacgagagactcggtgaaattatagtacctgtgaagatgcaggttacccgcgacaggacggaaagaccccgtggagctttactgcagcctgatattgaatgttggtacagcttgtacaggataggtaggagccttggaaaccggagcgccagcttcggtggaggcatcggtgggatactaccctggctgtattgaccttctaacccgccgcccttatcgggcggggagacagtgtcaggtgggcagtttgactggggcggtcgcctcctaaaaggtaacggaggcgcccaaaggttccctcagaatggttggaaatcattcgcagagtgtaaaggcacaagggagcttgactgcgagacctacaagtcgagcagggacgaaagtcgggcttagtgatccggtggttccgcatggaagggccatcgctcaacggataaaagctaccccggggataacaggcttatctcccccaagagtccacatcgacggggaggtttggcacctcgatgtcggctcatcgcatcctggggctgtagtcggtcccaagggttgggctgttcgcccattaaagcggtacgcgagctgggttcagaacgtcgtgagacagttcggtccctatccgtcgcgggcgcaggaaatttgagaggagctgtccttagtacgagaggaccgggatggacgcaccgctggtgtaccagttgttctgccaagggcatcgctgggtagctatgtgcggacgggataagtgctgaaagcatctaagcatgaagccccctcaagatgagatttcccattccgcaaggaagtaagatccctgaaagatgatcaggttgataggtctgaggtggaagtgtggcgacacatggagctgacagatactaatcgatcgaggacttaaccaatttgaatgtatgcttactgttatctagttttgagagaacactctcaatggtttggtggcgatagcgaagaggtcacacccgttcccatgccgaacacggaagttaagctcttcagcgccgatggtagtcgggggtttccccctgtgagagtaggacgccgccaagctgtcttaaaccagttcatgatgaactggtttttttatttgaaagatcacatagatatataaagctaatgcctttcaaaggcattagcttttttgtttacattgattttgctttgctgttgtgattttgaagattgtttgattttattgtctcgagtattcttaaactgaacacaatcagcagcataaggaccatcagtgcagtaaacagccagaacgcagtttgtgcgggatattcatctaagctccagccgacggcgatcggaaggagtgaacctcctaatccgtttgaagcgagcagaatactggtagtcgtttctgtctttccgggataaaaatgattcgtgatgattagggctattgcaaacatgcctgccatgaacagccctaaaaagaagcaaagggcaaagccgaaccatacgtttttacttagtgctaatacggtaagtgctgccagaccgccaatgcttatgagacgaagataacggtgatatgtcagcttttctgataccgggcctgttagtaaccttccgatgatcatccccgtccaatacactgtaactgttatcgttgccaaagagttggggatatcccatttctcagagaaaatggaggggataaaatgtacaattgaaacttcactgcctccgtaaaagaagaagtaagcccccgccaaggcaataaacagcaatccgtgtgaccgataaccggtgctttcttttttagtgtcatcggaagagacctcttttcggatgagaagctgatcaatactgccgaaactcatctgcttccatgcgattaaaagtgcaaaactggataaccctaatactaaaaaagcaattgtccacatgtggttgttgataagaaagcctgagagcagaggcatgaaaagcgcgcctaatccgtaggccacttccatcttgctcatggccacagcctgtctttctttaatagcggtgaggatgatcgtgcctacacaggattccaccaatccggcgccaagccccgcgatgctgacgagaagaaagagcagcggccagggcggcaggaaggtgatgaacatttcgcagctgatgagtgccaggccaaagataacgacgtttttgcgcccaagctttttcaccatgtatggcatgccaataacaccgatgagaaagcccatgaactgagagaataccaatacaccgccattactgtagctttgtgaataatgtgtgagtaactcaggcagtacggctcccagaataacaagtgtaaaagcaatcgatccataagaaaaacagcttatccacagcagacgagatttcatcattttatctccttattcgtaaaataatatttctctctactcgtatgacatgacgtttttacaaaaaatccaagtattgttactatatcacataactttttctcgtacatcccttatggtaacgttaacaaattgttaacattttttacaagaaagatcgttgacaatattttcaataattaatacgataaaaagcgaaattctaataatttcataggggtggtatttgtgggaacgaaggaaatcacgaatccagacagcttgtattacagtgttgacgatgtagtaatggagcgcggagaagggatttacctgtacgatcaagaggggaatgagtacattgattgcgcttctgccacatttaacttgaatttaggatacggtaacaaagaagtcattgatacggttaaagaacaagccgataagctgatccatgtgacatcatcttttcaaacagacgccgtaaataaactggcagaaaaactagtagaaatcgcccccgataatctcacaaaagtacaccctaaagtcagcagcggttccggtgcaaatgaaggagctattaaaatggctcagtattactccggaaaaaccgatgtcatctccttatttcgaagccacctcggacaaacgtatatgacttccgctttgtccggcaactcattcagaaaagaacctttcccgccgcaaatttcttttggccttcaagtccccgatccgtattgcagccgctgtttttataatcagaaacctgattcatgcggtatgctgtgcgtagaaagaattaatgattttattgagtatgcgagcaatggaaaaattgccgccatgattattgaaccgatatccggaaacggtggaaacgtcgttccgcctaaagagtattttaaacagctgagacagctttgtgatgaacacgatatcgccctgatttttgatgaaattcagaccgggttcggacggacgggcaaaatgtttgccgcggaccacttcgatgtgaaacctaatatgatgacggtagcaaaagggctcgggggcacaggcttccaagtcgccgccactctgacggaggacaagtataccgggcttccggggtatacgcactccttcacgtacggctcaaatgtgatggccgccgctgccgcgtgtaaaaccatagatatcatgcagcgtccgggatttttggaaaatgtaacgacggtcggtcattatattatggatcgcttagaaacgatgaaagaggatttcgcttttatttctgaggtaagaggcgtcggtcttatgatcggtgtggagattgtaaaagagaacaatgaaccggatgtggagctgaccaattatattgcaaaacgggcaatggattacgggctgattctccggacatcccgttacgggttcggaaatgtttttaaaatccgaccgcctttaactattacacttagtgaagcagaagtgctctgctacagacttcgcaagctattggaggaaatcaagtgagagactatatcatcgggcttggacaatttgtttatcataaggtgaaaagtcaaaaaggcacgctgaaaaaccggctcgtaaacggctattctccgggaggcgacgcccaatttaacatagacgccgctgctgaggaggcggtgctggattatattcaagataagggccatccggttgctttttacacggaggatggcggcctgaagctgattggagaagatccgcaatatattttaattgtagatccgatagacggaacgcgtccggccgccgcggggcttgaaatgtcgtgtatttcgattgcgcttgcttcgtataagccaaacgcaaagattaaggatatcgaatttgcttttttgcttgaattgaaatcgggcgcttacatgtacggtgatatttacagcgacgccattcagtttgaggggtatcagggagaattgccgaatttgagcgaagtgcgggatattaaaaatatgttttggagccttgagtttaacgggcatccggcacagctgatgacggatgcatacggtcatctgattgaccggtcagccaataatggcggggtttttgttttcaacagcgcttcttattcgatttcacgaattatcacggggcagatggatgcttatgtggatatcggcaatcgtctgctgaaagatgatccgaagctgctttcagattttcagcaggtcggaaacggagaggtgctgcatttgtttccttatgatattgccgcaagcgtctttttggcgaagaaagcaggagtggtcattacggatgcatacggccggtctttggacgaaacgcttctgacagatttaagttatcagaaccagcaatcatgtattgcggcatcaacgaaggagcttcatcaaacattgttagaccaaatccgctggggcagaaaggaagagaaatatgaaggcgttggtctggactcctaatgataagcttgaatatcaagaggtggacgagcctcaaattcggaaatccaatgatgtgaaagtgaaaattttcggcaccggtatctgcggaacggatttaaatgtgctgaaaggaaaaatgaatgcaacccatcatatgattatggggcatgaatcggtgggagcggtcgtggaaatcggaccggacgtgacaaatgtaaaagtcggagaccgcgtcgtgatagatcctacgcagttttgcgggaaatgtcattattgccggagagggctgacgtgttattgcgaaaccttcgaggattggcagctcggaatcggggcgcacggaacgtttgcggaatattacgtcggagaagacaggttcatgtacagaattcccgattcaatggaatgggagcgggccacattggttgagcctctctcctgtgtgctgaatgttgtggacaaagcttcgattcagccggaggactcggtcttggttttggggtcggggccaatcggactgcttgtgcaaatgatggtgaaaaaactggcgcgattgacggttgcgactgaaataggcagtttccgaagcgaggcggcgagccggatatcggattatgtctaccaccctgaagcattaaccgtggatgaagtgaaacggattaatcaaggaagaaaatttgatgtaatttttgacgcgatcggcaatcagcttgattgggcttatccttttattgaaaagggaggcagaatcgtgccgatgggctttgatgatacgtatgagatgacagtcaggccgtatcagctgctgtcaaacggcgtaacgattgtgggcacaggtgaagcccgtcagatcatggaggctgcgttagcatgtgcatccgaccttccgcagctctatgattttattacggaaaagacggaactgaagaattatgaagaagccattgatcatctcatgggcatcgacccggtgacaaaagaaagaaaggatatcagcgcaataaaaacgattcttgtgtctgatccggaacttttataaaagcggaaacggctccagtgagagccgttttcttttcttttttatacggtcttgcacatttctttaaagtttaatatgatactctttgttaaccattcctttcctcaagacattatactctgagcgtgtccccttttccccgtaagcttgcctcatattccccagataaaaatcaatgtttccaactgataaggtgcggatttttatagtgaaaaggagtcgttatcatttgaaagattatacgttacagcagcaatggttcgggaatgtccgtaaagacattctggccggtattctggttgctctcgctctgatccctgaggcgatcggattttcaattattgcaggtgttgatccgatggtcgggctttatgcatcattttgtatcgcgattattatttctatcttcggcggcagaccgggaatgatttcagccgctacgggttcaatggcggttgtcatggtgacattggtggctgattacgggctgcagtatttgtttgcggcaaccattttgacaggtattattcaatttattcttggtgtcagtaagatagcgaaattgatgaaatttattccgcgttcggtcatgatcggatttgtgaatgctttggcgatcttgattttttctgcgcagctgccgcagttcaaaggagcttcatgggtcatgtacgccatgcttgtcggatcactggctatcatatatcttttgccgaaggttacgacggctgtgccgtctccgctggtggcgattattgtcatgacgatcattgcggtggtcttccatgcggatgtccgcacggtcggtgatatgggcgggattacaagttcacttccgcatttcttgataccggatgttccgtggacgtttgagacattgcggattattttcccgtattcactggcgcttgcattcgtcggattgcttgagtcattgctgacggcccagatcattgacgaaatgacggatacggatagtgataagaacaaagaaagccgcggacaaggcatcgccaatattgtgaacgggtttttcggaggcatggccggatgcgccatgatcggccagtctgtcattaatacgaaagccggcggtcgcggccggttgtcggcttttacggccggagcgtttttaatgtttttaattgccgtattaagcggtatcgtcgtgaaaattccgatggctgcgcttgtggccgtgatggttatggtgtccatcggcacgttcgactggtcatcgattaaaggtttgcggaaagcgccccttactgattcgatcgttatggtgattaccgtcgtgacggtcgttctgacaaatgatttatcgaagggtgttttcgcgggtgtgctgctaagcgcgatcttttttacggcgaaaatttctaagctgaagattgtgtcacattccgaacagaaagatgtcagaacttataaggtaacgggacagatcttttttgcttccgtgtctgaactgatgaatgccatcgtttatgatgaagacgtgaaacggattatcatcgatttgactgatgcccacgtgtgggatgattctggagcggctgctcttgagaagattgtcgccaaatgtaaagaatacggaattgaggctgaattaaagggattaaatcagaaaagccgagatttaatgaaacaaatggcatagaatttgtgaagtccggatgaatatatccgggctttttttcggttaaatttgccggtgtgcattgttataatgaatgagacttgaaaaccgtatataggagacttgcatatgatgtggcttcagaagttgaaccaagtgttggggagaatcatgccgcttttgactccgtctagtgtggcggcgggtgtgctgttatctcagcatatcagctggatggccggcgctgtgccgtggatatttgcatttattacatttacgggcagtctgagtgccaattttcaatcgctgaagcgcagtatcgagaagccgctcccgatgatcatggcattgtttgttctgcatattttcatgcctgtttttgcatggggaagcggccatctgattttcagcggtgaccctttaactgtgacggggctgattatgggtgtggtgattccgaccggaattacgagtttgatttgggctgcgatgtataagggaaatgtcggattgacgctgtctattatcctggttgataccgtactttctccttttatcgtaccattaagcctgtctgtcctggccggggcgaatgttcagatggatgtgtggggcatgatgaaagggctggcggagatggtggtgattccgtccatcgcagggatgatggtcaaccagttttccccgccggtaaggactcaggcgataagccggtcactgtctcctttttcaaaaatctgtctgatgattgtcattgccattaacagttcggaaatcgcgccgtatgtcacgcacgtggatatcaaatttgcgggcatcgcaggcacggtattttttattgccatgacgggttatgccgtggcttggctgatcggaagactgatgaagcggagccaggatgaaatcgtgtctctgatttatacggggggcatgcgcaatatcagcgccggagccgttctcgccgtgtctttctttccgtctcaagtggcggttccggtcgtcatcgggatgctctttcagcaaatccttgccgctttgttcggctatttgctgagacgctttgagcttaagccggtcgtgatcaagtatgaaaaaaaccgctcagtcacgtgagcggttttttccgtacagccagcttagtgctgaattaaattgtcgtttgaacgcttcttgatggtgcacggcgccctcttcgatcgtgaatgagagctgagattgagaaaagcctttttgcctcaggcttttgtacacgtctttattttgtccgatcatggtgttttggatgttacatttttgctctgcttcacggctgccgacagacataaagatacgctgccgtgccggccgcaaaggtgcggagcggacataatctgctgatttttcataccagaaggaaccggaaatacagccgattctgccgaatatttcaggcttttgcagcatcgcgtatatcgaaaacagtccgcctaatgacgcaccgatcagtcctctcgtttccggatgcgcagaaatgtgatgcgtatcttcaacagtgggaataatgacatttgtcagctcctcgagaaagagcctccctttgccgccgaaatcatgaaacgcagggctcagggaaggcgcgggccacggtgtgtactcatcgagtctgtcagccggtttgatgccgatgaaaatcaattcgggaagtgttccgttcgtaaattgggattcaagcttatctatctgttctaaaaacaaagaacccccgtcaagtacgtacacacagggtaaagcccctgtttgaaccgaataggaaggaggaagatacacagtgcattcccttccgtttatcgggtgttctgtaagggtgcctctcatgcgtccatcccctttttttgcttaaacagaagaaaaaagaaataaggaacgccgagaattgcaaggataattcccgccggcacttctgaaggctgaaagaacaatttgcccgcaaagtcggcggatatgacgaggagcataccgaccagtccgctgaccggtaatgagtatctgtgctcaatcccggcgagcctgcgggaaatatggggcgcgatcagtccgacaaatgccatgctgcccgctgcggttacacatgcgctgatcaaagcgatgcaggcaatgagcaaaatggttttttctttattggttgaaacaccgaggcttttcaccgtgtcctcatcgaaacgaatggtatcaagcaatgacgttttcgccataagaagaggaatgaacaagatcagccacggaaggattgccgtaatggtcatccagtttgccgaccagatgctgccgtttttccaaaccatcgccatctcataatcctgcgggtccatttttaatgatagaaataaagacagcgcgctgaatccggaattcatggcgatcccgacgagaataattctgcccgattccagatgcccccggtgccaggcgaaaatatagatcagcacggccgccatcagtcctccgatgaggccgaagacaggcatacccatcgcagaggcaagtgccgtcgcttcagattgtccctgaaacagaagcataaacgtgacgattcccgctccggctcctgcattaatgcccaaaataccgggatcggcaagaccgtttttggtaatggcctgaataacagctccggctatccccaatccgagtccgatggcagcagccatgactatgcgcggcagcctcagctgaaacagcaaaatgtcatattgcggattcggatggatgcggaaaagcgtactgagcagttcacccggctttgcggaaaaagaaccgcttgtcatgctgaaatagcttacgagcaatatgagagcaatcagaatgatataaattcctgccattttacgcaccacgctgatcccctccttttcttttaatcaaataaagaaagaaaggaacaccgatgatagaagtgacaacttcaataggcgtttcaaacggataattgatgaatcggctcgcaaggtcgcaaagggtcagaaagacgccgccgataatgcacgcgcatgggatcagcctgctgtagtccgatccgacgagaaaacgtgtgatgtgcggaacgactaaaccgacaaaggcaatttttccggcgagcgccaccgagcttccggtcaatatgacaacagccgccatcgccatgagtttgatggttcttttctgctgtcccagactttttgaaatgtcgtctcctaatgatacggcagtgacctttttgctgagaatcatggccgtaatgattccgatcgcaaaaaacgggacggccagtttcaaaaaatcagggttcatttgatgcagtctcgcactgtaccaaaaactgagatcctgcgaaatttgaaaataaatcgaaagcgcagccgacagactgctgagaagcatactggtcaccgttccgataatggcaagctgcaccggggtaaaaccgccgggaagaatggaggccagcccgaaaacaagagcggcgccgaatgcggaaccgataaacgagtagatgatcatttcaatggatgtcgattgagggagcaataccatgcaaagggtgatgataaaagcggagccgtccgacacacccatgatcgaaggcgaggccagatagttccgtgtgattccctgcatgagcgctccggaaacagcaagggcggcgccgataaacatagcaccggcagccctcgggattcttgaatgccatatgatctgatggtcggtattctccggattaaagtgcagcaatgcggagaacacggtatggatgtcaagctgctttgcgccgtataaaacggaaaggagcagtgacagaacaatagcaatcggtgaagcaatgataataatgtgtgtccgccgttttgcatacatgtgaaaaacctactctttattagtcttgagtcaatttgtcagccgcaacctgtaagaagctgattttactccacgcggttccgccttgggctaatggatcaatcgtattgacgtatacatggtcttttttgactgccttcaggctcttccagatcggatttttctctaagtctttcaaagcgtcaggcttatctgcgttttcgtcatcagaaaattgtacgaagatatggtcagggttcatttcgcttaatttttcaagagaaatcagttcctgcgctttcgccgctttgacttcgtccggcgccttcaggcctaaatcaccgtaaagcgtggagttgaaataaacttgttcaggataaatataaatattgccttgtctgattctgatgaccagcgcgtttgactgtttcgctttgctgttgatctttgtttttgtctttttcaggtcctgttcgtaatctgcgatgatttttttcgcttttttctctttatctgtaagctgggcgagcagcatcatgttttctttccagtttgatgagatatgagagacagggatcgtttcagcggtgccgctcaattttttcaacgttttttccgggaatttggttgatgccagaatgacgtccggctgcagctcaagaattttttccatattcggctgcattttttcccccgttgatacggatttatctgtaatatctttaaacagttccgggaatttgccggagaaagaaattgctcctgccggatgaacgtcaagcaatttggcgtcttccattgattctacgctgcctgtaatggcgattttgtcagtcggcgctttgacttcatatgtttttccgagatattcgattttctttttatctgaagaagcgtcctttcctttacttgctgtatcagttgtttctgagcttccgcaagccgcggccgtgaaagccaaaagcaaaatcatgaaagcgaatgccaatttcttcatctattgttcctcctgttcaattgataactattatcaattggaattatagagaatgaatagggataagaccatggataatttccggcattaccatggacgatcttcggataaaatggaaatgctttgctcgatcatccgctgatgtccgcttggagaatattcaatccacgggtcagatgaaatgggaaacacgcgtttattgctgacggcactaaggttctgccatatcccggactgctgaatccgctgaaaatagcgaagcgtttccggttctttacaagtgaaaagcatgatgcagtcagcctggcaatccgccagcatttccaaggaaatcttttcgtcaggagcaaatgattccggttttgcggaggcaaagtccaaatcaccgaagaagacttcctcaatactgttgttatgggcgatgtacatattttctttatatacacggacaaataagaaccgctggtgccgcacatgtttaagagcatctttcgctgaatgggtgagactttgataagttttaagccagtgccgcgcttcctgctcttcattcagatatgcggctgtgcgaagaaactggtctctccaattctcttgagccggaagataaaaaacttcagtgatgtcattcaggcgctgtttttcttcttcactgacagaatcgagactgaaaataatgtccggggcagcttgagacagcgtatgcaggttctcttcccaatttgcattatagcggtaagcgctcaggtggaccggaatatcggaagagaattgtttgtaataataggccgtccatttcgggtgcagcgccgcagcgtaaggcacgtgatgcagaggaatcagatgccccatcgtttcttttccgtacgcggccatttttgtgcgcctttttttcatgtagcttgtaggtgagctgccggtatgttttttaaagatgcggctgaaataaaattcgtcctggtagccgatttgatgagcgatttcccgcagtttgcagcttgccttggccatcagttttttcgcattggttatgcggatgtctgtgatatattcagttacgctctgcccgtatagttttttaaaggtttcactgtaatgcttgggactgattcccgccatatgagcgagctgggtgagcgtgatttttgtgtcggactgagcatgtatgaattgttttgtctgttcgatcgccgctttcgtattattttgatggcatacttttgcggcataaaggtcgtacatcagctgctgaaagtcggcggtatatttcattttctgcaatccatccgccgatcgcacgttttcagaaagtgattgaagccggcttgtcaaatgatcaaccgtttgtaaattcatttgctgaagtccgtggaagatgtcttccccgttatccggaagcatcgcttcatcatctgaggaataggagaaaacacggagtctgacgatatacaaatggatgccgcctgacgatataggggcaatattgaatgtctcatcacaaggacagatgtagagcgtttccttctgcagcggaaagctgtctgttccgatatcaatttgtccctcgcctttcacatgaaagatcaatacgggggaatcagtgagctgatgctctgacagaaggtcggctgtttttttcacggagatgatatcaatgggctgaaagaataatgtgtttttcatgagaaaccaccttttaggaaacattcatttaaatgataacagttatcatttaaattgtaccaaataaatgaatgttttcctataaaaagcggaaatgtgaaatgcgtcaaaatgttacacgtgtaacacgaatgttgtcagtatatgaggtattgttttcttagagttttgaattggtccagccggcgttgatatgtgccggtgatgtcttcaatggaagcgcctttttctatttttttgcgtacccagccgttaccgatcagcttgtcaaaagagcctgtcggcaagaatgaaaagtcattcggatataagtcatgcatggttttcagaatggagagccctgtttttgccgcttcaaatgtgtttctgtttgttacgtagacttgtacgccgtggcacagcttgccctggtgtttggagaagctggggatgaatgaagcggctctgaaggtgacgcccgaaagcttgagactgttcaggcgttcttcgagctcggtgcttttcatataaggcgcgccgataagttcaaacggctttgtcgtgccccttccttcggatacgtttgtgccttcgattagtcctgttgccgaatatgcaaatatgctgtccggggtcgggatattaggcgaagggaggacgaacggcagaccggtatcttcaatcgtcatcgtccgcttccagcgcttcatttttacgacggtgaggtcagcgccaatatgaaactctttattgaataaaagagcaagctcaccgatcgtcatgccgtgcttcagcgggatcggatacagtccgacaaatgaagcgtaatccggttcaagaaccgggccgtccggatttcgtccgccttgcggattcggccggtccaagacataaaaaggaatgcctttttctttggccgcttccatggcataggccattgtataaatgtaggtgtagtaccgggttccgacatcctgaatatcgaaaatcagcacatctgtatctttcagcatgtcaggcgtcggtttcctcgtctccccgtataggctgtagacgggaagccctgttttttcgtctatataggatgtgactttgtctccggcctgagcatcgccgcggacaccgtgctccggtccgaataatgccgtcaggcggatgtctggcgcctcatacagcacgtcaacgctgcttttcaatgatgcgttcacaccggtcgggttggtgatcagcccgaccctttttcccttcagttcctgtttataatctttcagcaggcggtcgatgcctgtttggatgcttggtttcttggcggtatgaaggtttctgtcagaagccgccgagactgccgtcatagcactgatgacgacaagtccggcgagaagtgcagccgtatgtgttttcataatcagccctcctgtttaaagcggttttccggtcttcagattgataccgaaaccataaggatacagtgtcgttcccggatgcgtgactgaaggaatgtcagcgggcagcctgccttgcggtgttgtctgtccgaatatcgcttcaatgcctgccggaatgtttggctggaggaattgtccgtctgtatatcctttaaagccgtagactgcgataagggcttcagcttcttcaaaattcgcggcgtcgtaaggattacgcaggctcatcagcacaaagggtttttggttcgattgtgcggctttcatgacggcccgcggaaatgcggtcgtccacttgccgggatctgtgacggaatcgtcaatcacgccgtcgtttacgacagggtcattttttacgacataggagcctgtaatcacgtaatccgcgtcggataccagctttttgtgttcatcatgaaatgtgcgctcggcgaagttcattttactgatggttaccggccggatttttttcttcttgatgagctgccgaatggtttgttccattgccgctgtttgatcttcataaggagcggcaatgagaacgcggctgttctttttcggtttgaatgggagcgtgcggtttttgttttgtaagacggtgacggatctttccgcgatttgtttttcagctttcaggtgatttttgctgccgacggttttctttgcttttgcaatcttctttttcagatttgtctctttcggtgcgggatatatccctcgttttattttcagggaaatgatgcgttccgctgatttgttaatttgctgcagcggaatatcccctttttgtaccgccttttttaacgcggaatgaacccgggcaaagcggttttccgtttgcagcgatgtcacttgggccggcatcagggcaatatcgactcctgcttttactgccatgacgaccgcctcttcctgaccgaaatgatcggcaatggctttcatatttaatgcatccgtaacgatgacgccgttaaatcccatttcctcacggagaagatgagtcatcacttttttcgagagtgtggcgggtacgaggatgtctgaaccgtccagcttgcttttataggttgtatcgtcaaaagcgggaaattgcacatgagctgtcatgatcatatcagctccggcctgaatggcctgccgaaacggataaagttcaatctgacgcagcctttcttgattgtgggtgacaagcggaagaccgtagtggctgtcgacatccgtgtcgccgtgtcccgggaaatgtttgacggcggcagcgacattctgcttttgctgagccttcattgaggcaaggccgagggaagctgtcagatcacggtctgaactgaacgacctgacgccgatgacagggtttccgggattattattgatatcgagaacgggcgcgaaattcgtattaatgcccagtgctttcagttctttcccgataatggcgccggtctgggacgcgtaggctgtttttctagcagccccgagcgccatattgcctgggaaatgagtgccctcaccaagtctagttacgatgccgccctcctgatcaatgcttaataatagcggaatgtcagggctcgccttttgaaaggcatctgtcaggcgtaccgtttgctcagtgttttttacattttctgcaaataagataacgccgccgaaccggtacttttgaataagccctgcgacttcgtcattcatttgggtaagagcctcaggtgatgactgcccctttttttgccaatttcgaaaatcaggcatgagcatctgccctaatttttcatctaacgtcatacgggataccgcttgttccgcctgtgacggaatgtccggttttgttgatgcatgatgcgtgccgaatacaatgaacaacagtaatacagctgagatgaaaagtttcatgatggtgccctcctgccgtcatagtttggacaaaagacatgggttgtcattcaatggcttcataaatcgcttttatgacgctgccgtagcttccggtcgggaaaagatccccttcaaaaacattcgggttttcaccggggctgacgacgggggaatgctttttattggtcaaaagtgcgatccccagcttataagcgggatcaataatcgtgatggtgccggtccatcccgtatggccgtatgcctgcctgcttgcataaggtccgaacatccactccatatccgggctgccgtttttccgccagccgagagcgaaagtcggatcagaggatgccgccgttgtgaacaaatcggccgttcttttattgaagagagaaacgtgtttataactgcctctgttcagcatgacttgaagaaggacggccatatcatcagctctggaaaacagcccggcgtgaccggacacccctcccattgagtaaaatgctttttcatcgtgaacttccccctgcagcgtatatgtcctgatgtgagggaaatggatgactccgtcacgtgtgttgcctaaacgttcagtagctgcgaatgctttttctttaaaacctttttgcagcggattgaacagtgtgtgcgtcagtttcagcggtttgtacagttcttgttccgcataggtatcaagggtttttccggttatgttttcaatgatgcatccgagaatcatgtaaccgatatcgctgtatacgtgttttgttcccggcttgtattcaagcgggatctgggtgagaaaacggattgttttatcccgttcttgtgaatataaagggcctgcggtgtccggctgatagaaataaaagcttgccggcagaccggattgatgctggagcacatcgatgacgcgtatacggtctttttcttgaatcggatcgctttttctgtctttgaaatcaggaaggtaagccgagactttttgatacacatcaagctttccctggctgacgagtcgctgtagtgcaaaattggccgcgtacatttttgtattggaagctaaatcaaacatggttgatgttttcatttttttcggacgggataaaagggtgttcccgtcatattttttgctgtagccgtatgctttctttttgatcacccgtccgtcctttacgacgatgaggacggctccggggaatcctgctgcgatgtctttttcaatcatttgatcaacctttctgagctttgctgcgtcgtataatttggattgggcttcggctttgtgctgcggcagaaaagagaggctgatgaccattgtgagtatggcggctgtcagtgttttcatattctgatccctcccggtttattcaaattcagcagccatgtcatccttaaatccgaacgcataagtgaagacaaagcctgccgcgtaagagatgaagagaccgatgatatacaaaacgatttgagccggctgtacgagaaacgagagcggaaggccggagacaccgattgaaaaagtcgccacttgaaaatgggcttgaaaggcgccgccgattcccgcccctaaacacgccgtcaaaaacggccggccgagcgggagcgtgacgccgaagataagcggctctccgattccgagcagaccggatggaagtccgccgccgatcgctctttttaatgaggctttttttgttttcataaagatggcgaaggccgcgcctacttgacccgcgcctcccatcgcgagaatcggaagaagcgggtcatctccgattgatcggattaattccaaatgtacgggagtcaagccctgatgcaggccggtgacgacaagaggcaggaaggcggctcccagtacaaaccctgagagcactcccccgacattcagcagcgacaataaacctgatgtaatcagatcagaaataaaaccgcctgcagggataaaaacgacatatgtcaccagcccggtgataagtaaagacaatgtaggcgtgacgataatgtcgatggattgatggacgtactttctgataaaccgttcggtataagcgataaaaaccgcagcgaaaagaacgccgattaatcctcccctgccagggagcagattctctccgaacaaactgatattggcgatctcagggttaaggatcaatatgcccgcaaggccgcccatcgcgggtgtcccgccgaattccttcgccgcattgatgccgacaaggacgccgaggtaagcgaacaagcctgaaccgataaccgttaaaataagtgcgatttgggattctttcgggagccagccggcctgaatgacggctttcgtaataccggtgattaaacctgatgcaatgagtgcaggaataaggggaatgaagatgcttgatatttttctcagaaacaatttgatgggtgtggtgttttttctgttgagatcggcttttttccgtgaggcggcttcttttaaatcaatgttttttccggatggcataagttttgcgaaagcgtcggcgacatgattgacgacacccgtgccgagaatgatctgcagtgtttcggcttcgacgacgcctattaccccgtcaagccgtttcagcgcctcaatatccgttttgtcccgatctaaaggtgtaatcctcaggcgtgtcatacagtgggtaaagcctgaaatattcgatgaaccgccgcaattgtccaggatatctttggccagtgactgataaaatgcctctttgctcatggagatcctcctttttctgtacgatttttcccggggagctatgcctgaaacgcgtcctaaaagcgcctgcgccgaacatgaaaacggcgcgggctcgtaaaagcacaatatttttctccaaagaacgatcagcgttctttttctcttgaaacgtgctgttcaatggctttatcaatgaatccttctgattctttgagcagtgccttcgcgtgtgtttcgtccgaattcgtcttcagcatgacgattgccgttttgacatggctgtctgcggcctcaagcgtttcttttgccttgtcgtacggaacgcccgtgatgctttggataatgccgattgcgcgttctttcaatttttcgttgctgacatgaacgtccaccattaaattttcgtacactttgccgcttttaatcatcacggccgtggaaatcatgttcagaatcattttatgtgccgtcgcggctttcattcgtgttgaccctgtaatcacttcggggccgacaatgacttcgatgctgtgatcggcaaaggtgctgatcaaggagtccttattgcatgtgagcgcgacggttttggcgccgattgtttttgcatatttcagcgcaccggccgcatacggcgtgcgcccgcttgccgcgatggcgatcacggtgtcttctgcggtaagcccgatcgttttgagatcgagagcgccggtttcctcgctgtcttctataccttcagccgcttgcaaaaaggcgtctgcccctccggccatcagaccgatgacggtgtcgggacttacgctgtatgtaggcgggcattcaaccgcatccagtacaccgagtctgccgcttgtgcccgctcccgcataaatcagcctgccgtttcgccgtaaggactgatgggcgaattgaacggcaatctgaatatcgggcagcacctgctgaacggcttcagccactttgaaatcctcttcgttaatgatgcggagaatttccattgtgtctgcctgatggattgaagcggtctgcggatttctggtttctgtggtcaatctgtgaatgttaagccggtctgtcatgattgtaccctcccaagtcgttaatacttgaagtatatgggcttctgaatagatgtttcaagaaaaatcggcagggatgagatgaataatcaagcgctttcacaaaaaatgatgcagaatgtgctgttcaccgatcgggccgatcctgcgccgccctttgtcaataaaaccggaagaccggtacaggttctttgcacgttgattgcgatggtttacagcaagcacgatttcatcacaccaaggaaagtaatttgcgacaaaagcggggagctgcagcatcgcttgtttggcataaccttttccctgatgcggcgcatgtaatgacagcgcactcagcaaaatggcagacacattgttcgaatacggagcaatggtttcttttgaggtatgtaaaataaaaaaaccgacggggcggtcttcttttaaaatgactgtcgggtagcgatcccggatgacaagcgcctgcggcaggacatctatcggcagagctgtgaactttttatcttcttcactcagcacaaacccgttcagcccgtctgcatgctccggtttataaaaggacagggctacatccatgatatctactctccttttttataattgatccaattcatcttctgatagaacacggcagcctgcccgttttaaaagagcggaagtgatgccgtctccgagtattttttttcctgagaaagtgccgtcatagataaagctgctgccgcaggacggactgttttctttaaggatgaccgttgcggcgcctatttcttttgcgtatgctaacgttttttccgcgccgtccatatataaagctgtaacgtcttcgcctgatgccgttacgattcttgccgttccgttcagcacgtcttcacccgtgccgccgatgatttccgccggttcgcggggagtggtgaagccgcccaaaagttcggggcagaccataacagctttcttttcttctacgagtctgcggattttttccgaagcggcgtgagagccgttatatctgcattcgataccgccgagacaagagctgactaagatcatctgtgtccattcccttcaatattttgatactttcatcataaatgaaataagagaggagggatgagtttttcagttaaaaaacgggtaaaaaagtttgaaaataaaaaaaataatttttctctttacaaatggggtacaacctgtatataataacttttgtcagctcgacgcggacacagcggcccgttggtcaagcggttaagacaccgccctttcacggcggtaacacgggttcgaatcccgtacgggtcatatggaggattagctcagctgggagagcatctgccttacaagcagagggtcggcggttcgagcccgtcatcctccaccatatttgccggcctagctcaattggtagagcaactgacttgtaatcagtaggttgggggttcaagtcctctggccggcactgttttccaaaaaaatacggaggggtagcgaagtggctaaacgcggcggactgtaaatccgctccctcagggttcggcagttcgaatctgcccccctccaccatttttgggctatagccaagcggtaaggcaacggactttgactccgtcatgcgttggttcgaatccagctagcccagtctcagacaccttttgcataaaggtgtctttttttatcggcattttgtttcggtttttgattgttcatcagatatactatttttaagctgctgttaaggcagtatattctgtattttccatctacaccctgcctgaaatttggtaaaataaatgtaataaaaaaatgaaaccttttaaaacaatcaacgtatagatacagaccggtgaagggcagaggtaagataaaacatggaaaacctgattaaaaaaagaatcaagcaagtcaaaaaaggcgatcaaaatgcgtttgcagaaatcgttgacctttataaagataagatttaccagctttgctaccgcatgctcggcaatgttcacgaagcggaagatattgcgcaggaagcttttatcagagcgtatgtcaatatcgacagtttcgatatcaacagaaagttttcaacgtggctttacagaattgcgaccaacctgaccattgaccgcatccgcaagaaaaagcctgattactatctggacgcagaagtagcgggagcagaagggctgacgatgtattcgcagatcgccgcggacggggttctccctgaagacgccgtattgtcattggagctgtcggacacaattcagaaaaagattttaaagctgcctgacaagtacagaacggttattgtattaaagtatattgacgaactctctttaattgaaatcggggagattctgaatatccctgtcggcaccgtcaagacaaggatacacagaggcagagaggctcttagaaaacaattgagggatctttaagtggggtgatgaaatgagctgtcctgaacagattgtgcagcttatgcataagcatcttgatggagatatccttcctgaagatgaaaacgtattaaaacaacatttgcagtcatgcgggaattgcaaacggcattttcatgaaatggagaaatccgtagcactcgtccgaagcacatcgcatgtcacggcccctgctgattttactgccaaagttatggcgaatcttccaaaagagaaaaaacgcgcttctgtaaaacgatggatcaaaactcatccgatgattgcagccgcagcggtttttgtgattttaatgggcggcggttttttcaacagctggcataatgaccacaatttcagtgtgtccaaacagccgaaccttgtcgtgcagaatcacacggtcaccgtccctgaaggcgagaccgtaaagggcgatgtcacagtaaaaaacggcaagctgttcattgaaggaaaagtcgacggcaatgtgaccgtcgtcaacggagaaaaatacatggcctcagccggacaagtcaccgggcagattgaagagattaaccaattgtttgactgggtctggtacgaactgaaatcggcgggacagggcgtcgtaagcgctttggacccgaatgaagatgagtaaagcgtataatcgctttactctttttttgtgcaacgccgcgccggctcatttcacttgagaaatcaaaatgtggtataatgagcacgctatatgatgtacatattgctcatgcagcacaattcataacggaaaaaacgaaatgactgaattcttggaggacgaggaaatggcttttgaggacatcccatttttgcaatacctcggcaatgccgttgatattctccttgtttggtatgtgatatataaattaatcatggtcatacgcgggacgaaggcggttcagcttttaaaaggaatcgtcgtcatcgtattggtccggatggccagttcatatttgggactcagcacgcttcagtggctgatggaccaagcgataacatggggatttttagcgatcatcattatattccagcctgagctgagacgggcgcttgaacagctcggacggggccggttcttttccaggagcggaacccctgtggaggaagcgcagcataagacaattgaagcgattacaaaatcgatcagctacatggcgaaacgccgcatcggcgcactcatcgccattgagcgcgatacgggaatgggcgattatattgagacgggcatcccgcttaatgcgcaggtcagctcggagcttttgattaatatcttcatcccgaatacaccgctgcatgatggagcggtcattatgaaaaataacgagattgctgcggctgcctgttatctgccgctttctgaaagcccgtttatttcaaaggagctggggacgcgtcacagagcggctgtcggcatcagtgaagtgacggacagcttaaccattattgtatctgaagagacgggcgccatcagtgtggccagaaacggagaccttcacagagaattgacggaagaagcactgaaagaaatgcttgaagccgagtttaagaagaacgccagagacacttcttctaaccgctggtactggaggggcaagaaaaatggataaattcttaaacaaccgctgggctgtaaagatcattgcattgctcttggcgctgctgctttacgttgcggttaacaacaaccaggcgccgactccgaaaaagccgggggaatccttttttccgacatcaacgactgacgaggctacgcttactgatattcctgtaaaagcatactacgatgaagcgaactatgtcgtcaccggcgtgccccagacggtaaatgtcacgattaaaggctcgacaagcgcggtgaaaaaggcgagacagacgaagaattttgagatatacgccgatatgaataagctgaagaccgggactcataaggtcgaattgaaggcgaaaaacgtatcggacggactgacgatctccataaacccgtcagtcacgacggttacgattcaggaaaaaacggctgagagttttcccgtggaagttgaatactacaataaaagcaaaatgaaaaagggatatacccctcagcagccgattatcagcccgaaaaacgtgcagattacaggttcgaaaaatgtgattgataacatttcacttgtcaaagcatctgtgaaccttgaaaatgcaaatgagaccattgaaaaggaagtgaaggtgaccgtctatgacaaagacggcaacgcacttcctgttgatgttgaaccgtcagtcattaaagtgacggttcccgtagccagtccgagcaaaaagcttcctttcaaaatcgaaaggaagggaagtcttccggacggggtgagcgttgcgagcattgactcgaatccgagtgaggtgacggtttacggcccgcaggatgtgctggattcacttgaatttattgacggcgtatctcttgatttaggcaaaattgataaagataccgatatcaatgccgatatcccgcttcctaagggtgtcactaaggtatcaccggaaaaaatcacgcttcatgttaaagtggacagtgaagacaaaaaggattttgacaatgtcgcaatcaagacggtcggactgggaggctcacagcagattgagtttctcgaccctgaatcgcaggcgataaatattacggccaaaggctctcccgccaacattaaggcgctgaaaaagtcggacattgaactgtatgccaatgtctcggacttggatgacggagagcactctgtaaagcttgaagtaaacggcccgcaaaacgtcacatggtccctgtcaaaagacacggttaagatcaagctgacttctaagaaaaacacaagttcaaataaaaatgacggcggctccgctgattccggcaataagaacggcacaagcggagacgcagacaaagacaagaacaagaaccgggaagacgacactgacagcgatcagaataaaagtcaaaaccaggatcaaaatcaagaccaggatgaagacggatcaagcgctgattcttcttcaacagaatgaaaaaggagcgatacaaaatgggcaagtattttggaacagatggtgtaagaggtgttgccaacagcgagcttacgccagagctggcctttaaagtggggcgttttggcggttatgtcctgaccaaagataagcagcgcccgaaagtgctgatcggccgtgatacacgtatctccggacatatgctggagggagcccttgtcgccggacttttatcgatcggagctgaagtgatgcgcctcggcgttatttctacgccgggggtatcctatttaacgaaagccatggatgctgaggcgggcgtcatgatctccgcttctcacaaccccgtacaggataacggaattaaatttttcggaggggacggctttaagctttctgatgagcaggaggccgagattgaacgtctcatggaggaaccggaagataagctgccgagaccgacaggcgcggacctcgggcttgtgaacgattattttgaaggcgttcaaaagtatctgcaatttttaaaacagacggcggacgaagattttacaggcattcatgtagcgcttgactgcgcccatggtgcgacatcttccattgcgacgcacctttttgccgatctcgatgctgacgtatctacaatggggacgtctccgaacggattaaacattaatgatggcgtcggttctacacacccggaagcgctgagtgctttcgtcaaagaaaaaaacgccgatatcggccttgcgtttgacggagacggcgaccgcctcattgccgttgatgaaaaaggaaacatcgtcgacggcgatcagatcatgtacatatgcgcgaagtatttgaaatcagaaggccgtctgaaggatgataccgtcgtatcgaccgtgatgagcaacctcggtttctacaaagcgcttgaaaaagaagaaatcaaaagcgttcaaacggcagtcggcgatcgctatgtcgtagaagcgatgaaaaaagacggctataatgtcggcggcgagcagtcagggcaccttattttccttgattacaacactaccggcgacggtcttttgtccgcgatcatgcttgtgaatacgctgaaggcgtccggcaaaaccctttcagaacttgcggatgaaatgaaaaaattcccgcagctcttagtgaacgtgaaagtgacggataaatataaggtagaagaaaacgctaaggtgaaggccgtgatttctgaagtggaaaaagaaatgaacggagacggccggattttagtgcgcccgtcaggcaccgaaccgctcgtacgcgtgatggcggaagcgagaacaaaagagctttgtgacgaatatgtcacaaaaatcgtggatgtcgtgcggacagaaatgggagcggagtagcgaagtttataagcagagagcgaacaagacaagtgcgatcagcataaaatgatagtaaacatgatgccggggcggcaaaaaataattgaccgtccttggcacatgctgtaaaatcaagcttgttcagcctttgtttttcacttgcaggaaaggcgggattgtttgcatcttttataattacagcgcccgaactaagcgcccgaaaaacggcttagttgacgaggatggaggttatcgaattttcggcggatgcctcccggctgattcatttagatcacagccgtaaggatttcttcaaaccggaggggcgactctccgaacaaagggaaatcacatgatcttccaaaaaaacatgtgggaggggacgattgaaagtccccttgtaatttgactttcttcgtctccttttacacctttaggaggaagaaaatatgtgtggaattgtaggttacatcggtcagcttgatgcgaaagagattttgttaaaaggattagagaagcttgagtaccgcggctatgactctgccggtatcgctgtggcgaatgagcagggcgtgcatgtgtacaaagaaaaaggccgcatcgccgaccttcgtgaagtggtggaccacacggttgaatctcaagcgggaatcggccatacacgctgggcgactcacggcgaaccaagcttcctgaacgctcacccgcatcaaagcgcactcggccgctttacacttgttcataacggtgtgatcgagaactatgttcagctgaagcgcgagtatcttgaaaacgttgaactgaaaagcgacacggacactgaagtagtcgttcaaatgatcgagcaatttgtggcgggaggactcagcacagaagaagcgttccgcaaaacactgactctgttaaaaggctcttacgcaattgcattatttgacggtgaaaacacagacaccatttacgttgcaaaaaacaaaagccctctgttaatcggccttggagatacgtttaacgtcgtggcatctgacgcgatggctatgcttcaagtaacgaatgaatacgttgagcttttggacaaagaaatggtgatcgtgacaaaagacgaagccgtgattaaaaatcttgacggtgaagtcatgacacgtgcgtcttatatcgctgagcttgacgccagtgatatcgaaaaaggcacataccctcactacatgttaaaagaaacggatgagcagccgcttgttatgcgcaaaatcatccaaacgtatcaggacgaaaacggcagactggccgtggcgggcgatgtcgctgacgccgtggcggaagcggaccgcatttatatcgtggcttgcggaacgagctatcacgccggtcttgtcgggaaacaatatattgaaatgtgggcaaacgtaccggttgaagtgcatgtagcgagtgaattctcttacaacatgccgcttctgtctaagaagccgctctttatcttcctttctcaaagcggagaaacagcggacagccgcgccgtgcttgttcaagtcaaagcgctgggtcacaaagcgctgacgattacaaacgttccgggatcaacgctttcccgtgaagcggattacacattgcttctgcacgcaggtcctgagatcgcggttgcatcaacaaaagcgtatacggctcagattgccgtcctcgcgatcgttgcgtccgttgcagcagaacgcaacggcgttgatatcggttttgatttggtcaaagaattaggtattgcggcaaacgccatggaagccctctgcgaccagaaggacgaaatggaaatgatcgcgcgtgagtacctgactgtttcaagaaacgctttcttcatcggccgcggccttgactacttcgtgtgtgtcgaaggcgccctgaagctgaaagagatttcttacatccaggcggaaggcttcgccggcggcgagctgaagcatggaacaatcgctctgattgaagaaggaacaccggtctttgcgcttgcgacacaagaacacgtcaacctgagcatccgcggaaacgtgaaggaagtcgcggcccgcggcgccaacacttgcatcatctcgctgaaaggcttagaagacgcagacgacagattcatcctgccggaagtcaaccctgcgcttgctccgctggtttctgttgtgccattgcagctgatcgcttactatgcggcactgcaccgcggctgtgacgttgataaaccgcgcaaccttgcgaagagcgtgactgtggaataatatatttaacccctttggttattagccagaggggttttttaatgcggaaatgagaaatgcatactctttgcgattgtaaagaaatccccttttatatattgaaaaggagtaacacctgctttataatacgagatgcattccggttaaaatccataaatgtaatcattagtaaatcattttgtgtatacctcatcggaaagtaaacacctcagcagttttcatcatgaatatcccattatataaacctaatcaatcgattacacttccatattatgcttaagactttaaaatcccttttgtatttcccgactcctgatccattatgaatacctagaccagatatgaaaatcacaacatttttacaataatccggttcaattcttaaaaaagtcctgacaacaatgataggagtggaatgatgtcaaaccttttagaaatcagaaacatcagcaaatcttttggtcataaagctgttttaaaggatgttacattcaatgtgcctgccggatcaattgtcggttttatcggtgataacggcgcaggcaagtcaacaacatttaaaacgatattaggattaatctctcaggatagaggtaaagtgaaaatctttggtaaagagaatctggataaacatataaagtttaaagaagatattggggtcgtatttgatgcgatgaatcttcccgcgcaccttacgataaagcagctgaatcatgtatttaagaaactgttcgacgcttgggaccaagatcaattttaccggttggttcattctttctctttacctatggataaaaaagtgaatacattctcgcgcggcatgtcaatgaagttatctgtagctgttgctttgtcgcataatgcaaaattattacttctggatgaagcaacgggagggcttgatccctcttcaagagatgatctgttaaatgaattaaaaagctttgtgagtaaaagcaacggaggtattttactttcatcgcacattatgactgatgtcgagaagatagccagccatatcattatgatgaaagatggcgaaattttattaaatgaagagaaagataaggttcttgaaagctataccgttatagacgttgatgaaggtcaattggctgagattgacgaagatatcgttctagcaaaaaggaatcatggatcttattggagtgtgcttgtatcggatcaacagaaattgccgaatggcgtaacggccaacaccatttccatagaagaaatcagcgtctttttaacgaggagtgaaaacattgagaggtctgttactgactaactattacttggtttatcggagtttctttgcatacacggggttggccatattggtatcagcagtcattttttattttggggatgcttcaatgcatcgttttgttgctatgctgattattttgtttgtcgttatgcccgcacttgaggttataaagtatgagagcaagtcaggctatgacaggtatgttctgactttaccggtcagcagaacaaatattgttcaaagtcactatttcttttatcttttgattgttgtgatcggagctgtaatatcttatggtattttccttgtatacagcctgggttctgatgaaccaattgacggtatatttaatattgtctcttttggaacgttcatcgttctctttgccggtgcaatcgtttatcctcttctctacatgataggcccggaaaaatccgatgctatcgtgattggaggggcaatggggggactttttgctacctttggattgcaaagtgtcgttgggtatgcagcagaacaagtaccgctgtcatttttgcacataaatccttctttatatgtcccgattatatatctcatgatcggcgttatcttatatatcatttcatttttcatcgccgcagctatatatcataaaaaagaattttagcagctgatcaatttataataggataagtgtgtttccagcctttactgcaaagtttcacagtcttggctatcccagagtaaaaggtgaaaaagctgacaaatgatgccgtcagcttttctttatgtgtttttttaaaactcctcatactccgccgggtcttggccgtttatccgtccgtcggggcgggtaagcgagtcgatgatgctcatgtcgttttcatcaagggagaaatcaaaaacagagatgttttcaagctggcgctcgggcgatgctgattttggaatcgggatggcgcccagctggatatgccagcgcaaaatgacttgagaaatggttttgccgtatttgtccgcaatctgtccgagtttttgatcgttcaatacttcgccggcgcgggataacggactccatgattctgtcacgatgccctgttcttcgtgccattggcgctgctgctgctgattaaaagcgggatgcagttcaatttggttgatgcctggctttacaccggtttcacgttcgagccgttcgatgtgctcaggcaggaaattgcagacgccgatggatcggatcaggccccattttttcgcatcaatcagtgcctgccatgcttccgtgtagcggtcttgtttcggattcggccaatggacgagatacaggtcatagtagtccagaccggcgcggtataaagattcttggatggtttgtacagctttgtcatagtcatggtagcgcccgggcagcttggacgtcacgtatagctgttctctcggaacagagcttctgcggatggcttctccgaccgtcccttcattttcatagttataagcggtgtcaatcagacggtagccgatatcaatggcgctggtaatggcatgaacgccattgtttccattaagagcgtatgtaccgaagccgatcgcgggaatgcttgtcccatcaagcagtttcttttgcggaattgccccagtcatcattaaatccctccttgttttctactttaccattattcttacaaatgaaacataataatggaaggaaatgagatgatccgcacatgaaaaaagctgacggagaaccgccggctttaaatttgaaacatccatgctacgacggggccgaagaccgaccctaacacggcgcagagcgtcatggaaacagaactcatggagaccgttaattctccgtactccattgcttttgaggtgccgagcgcatgggaggcgctcccgaatgcaattcctttcccgagtgagctgcggatgcggatccacttgagaagcagcggtcctaagataacgccggaaaaccctgcgatcatgacgaacacgactgtcatggaagggacaccgccgataccggacgcaatctgtatggcgacaggcgtcgtaattgattttgggataattgacaaaatcaaactccggctgatgccgaacagctctgcaaatagcaggccgctgaccattccggagaataaaccggccaacacgccgccgatgatcggaaacatatacttgattaacacccggcgctgcttataaagcgggtatgccaaagccaccacagcggggccgagcagtgaattgatccattgtccgccgatcatatagtctttatacggaatatgaaaaacaagcagcacggcgataatgaaaatcgtagtcgtcaaaaccggtatgagaaaggggtatggaaagcgcacatataatttcaccatagccagataggcggcggccgtgaacaaaattataaggattgcgatacatgcttgctgcacttctttttctcctttctctgattggctttatgctctaacagctggctggcgtaccctgcggcgatcattgtgacgatggtgctcagcacgatgatcagaaacagagcagccccgctggcggaaaacagtgacgggtaattgatgacgcccgtcatggccggaatgaataacagcggaagaaaagacagcaaaaatccggctccgtcttcaatcattttgacgggaatgatcttaaccgataaacatatgatcagcaggatcaaaccgatgatgcttccgggaatgggcaggtgaaagaactgctgaacggctcccccgataaaggaaaatgcgaataaaataatgatttgcaagatgatgcgtatgactttcacaacgatgctgttctttggagaagagcagcttccccctttcttgatgtttctataagtttctttacttttggcacatatatttgtactatacaaatatatgtatgcaaaatctttctatatgttttctgagtaaatgtgcatatgtttgtattatacaactaatgttgctgttgtcaatgtaaggagtgaggcgtttgtcaaaacaagatccgattgaattaattgaatatgaactcaccactttcatcaggagagctgtttatcttgataactccgaccgtaaaatcggacatctggaaagggctgcgtatttgttattacggcagctggatgaattcgggccggcgcgtgtgaaggaattggccgaatcatttaagctggatatttccacattatcacgccaggcagcggccttggagtcgaaagagctgatccagcgtttttccgatccttctgacgggcgggtcagtctgtttgcgattacgaagcttggcaaacagaggttaaaagctgataaaaagatgcgtcttgagcggtatcatcgtatgcttgacgattggtccggcgatgaaaaagaaatgttcggccggcttttgctgcggctgaatgaggcatttatcgattaatgcatgatttttgccgggttaagcaggattatggcgtatacaagggagaatggaagagagtaaggctttacgccattctgcttagcaaaaataatattggatagggggcggaaaacgtttctcctgggaaataatgtttctcggaggctgcggcatttattatctcaatattcacaattcaataaaaatgaaagcgctttatttttagtccgttggttcagagtgtaaggtgtttgcctgaaaaaaacaattgtattttccacgaaaatttattatgatggaataaggaaattggagattatataacgataggaagatagaatatttccaatattgcgggaaatgaagagtgagttaggttcaacaggtgcaccttctgcttcattatttcacatatatcagagctgttaagaggaggaagcgaagtggcaaacaaagaattaaagagaggcttaggcgctcgtcatatacagatgattgcgctgggcggcacgatcggtgtcggtttattcatggggtcatccagcacgatcggatggaccgggccgtctgtcctgctggcttatgcgatctcgggtatctttatcttttttatcatgcgtgcgatgggcgaaatgctctatgtagagccgagtacagggtcgtttgcgacattcggccataagtatatacatccgttagccggctatatgacggcgtggagcaactggtttcaatgggtgatcgtcgggatgtctgaaattatcgccgtcggttcgtatatgaaatattggtttcctgatctgccggcatggattcccggcattatcgccatggccattctcggtgcggcgaatttaatttcagtaaaatctttcggtgagtttgaattttggtttgccatgatcaaaatcgtcaccattattctgatgattgtggccggaatcggaattattttcttcggtttcggtaacggagggcatgcgatcggattatctaatttatggtcgcacggcggtttctttacaaatggtttttcaggatttttctttgctttgtctttggttgttgcggcctatcaaggggtcgagctgatcggaattacggcaggggaagcgaaggacccgcaaaaaacgctgcgaagcgcgattcagagtattatctggcggattttaattttctacatcggtgcgattttcgtaatcgttaccgtatatccgtggaatgagcttcactcactcggcagtccgtttgtttcgacatttgcgaaagtcgggattacggcggcggccggtctgattaactttgtggtgattaccgctgcgatgtccggatgcaacagcgggatattcagtgcgggacgtatgctttatacgttaggcgtgaacggacaggcaccgaaattctttaagaaagtttcttcgagcggtgtgccgatattcggtacgcttgcggtattaatcggacttgtgatcggtgtcgtgctgaactacatcgcgcctccgaaaatctttgtttatgtgtacagcgcgagtgtgctgccgggaatgattccgtggttcgtcattttgatcagccatctcggtttcagaagagcgaaaggcgctgagcttgataagcatccgtttaaaatgccttttgcgccgtttacaaactatttgacgatcgctttcttactcatggtattgatcggcatgtggtttaacaaagatacgcggatttctttggttgtcggggtgattttcctggcgattgtgacggtcagctattatgcgttcggtatcggcaagcgcatgcctggtgaaaaatcgaaaatagaagacgctgtataattcaaaaagacacctctcttacaggggtgtctttttcggcttgtccgcgagtggtatactggttaaaaaaagcagaaccgggggaaacatcgatgagtcattaccgtacgttattatttgatatagacaatacgctgctggattttaccgcttcagaaaccgatgctcttcaaaaattgttccaaggttcaaagctggagctgacggcagaggtggaagcccgttataaagcgttaaatcaagggctgtggaaggcgtttgaagagggggaaatgacccgcgatgaagtggtgaatacacggtttgcccttttgtttaaagaatacggccttgaagccgacggcgtgctgatgaatcaggcgtaccgccaatacttagaagaagggcaccagatgatagacggagcttatgagctgattgaacggctgagtcctttatttgatttatacatcgtgacgaacggcgtctcaagatcacaatataagcggctgggcgactccggtctgtatccgttttttaaagatgtgtttgtatctgaggacacgggttttcaaaagccgatgaaggaatactttgattatgtatttgcgagaattcccggtttttctgccgggcacgggcttattatcggcgattcattgagcgcggacataaaaggcggtcagatggcgggaatggatacgtgctggtttaatcccggaaagaaagcaaatgagtccgggattatcccgacgtatgaaattcattcgcttgatgagctgtatgatgtgctgaacgtggaggttgtcgctttatgatttctcaatatatgtataatataatttatatcaagttgtctcgggaaggattattatgaaaaatctttcttcaattagtacaagagtgctcatagagaaaaccattatttgtttttccttatattctattatcagttctatttttaaaacgccaacttttacggcttcggaatccgcttacctgctgattatcaccatttttttagtcgtcaacgatcatatcagattaaaatacctaagcggtcagtattcttttagatattatgcatcttttttagtaagtaaccttttatcaggcattttattgtttaaaattaactgtctcggttctcaaatatataatatttttttactgatcgagattattgtaacaactcgtaaactgccctggactgtagtaagtctgcattttattattttttttacagctcttaaagcagcagggaccagcgggaaagatatattgatgtcctatttagtgatcatggctattatttatctgtttagaaacgtactgctcgaaaaagcaaaaatacaaacattaaataaagaattacaaagtgtaaacactaaacttaagaattattctcaaaaaattcaagagttaactatttctaaagagcggacaagaattgcacaagagcttcatgattccctggggcattatttgatcgcattaacaatgaatcttgaattcgccgataaaatagtaagtaaaaatcccggcgaggctaaacaagtcatcaataagtcacatgatttatcgaaggagtgtattattaacctgagagaagctgtcgctttgctcaatgaccctgctcctcaaaaagggcttctgaaatcgatcaatgagatttttgaaaattttcagcaaacaaatgaaataaaattcgagcttgatatggacaataaagtagagtcagctgatccagatatcaagaattgtctctataaaacagtacaagagtctataaccaacgggataaaacatggaaatgctacgtttttttcaataaaaatacgtaagtcttttgaaaaaatctctatatcgataactgataacggaacaggatgttctgaaattaataagtcaaatggaataaacggaatagaaaaaagatttgccgcacttggaggagaggttgatttttattcagggctagattcaggatttactgtggaagccgtaatccccgagatagcagatctttaatcggaatgtgaggaggtattgatatggatattatcattgtggatgatcagcaaattgtcagggaagggcttaaaatgattctgagtctgcacgaggaaattaatattgtaggcgaagcttctaatggtgaacatttattagatttgctaaaacagataaggcctgaaatcattttaatggatataagaatgcccgtaatggacggcattgaagcaacaaagctagttaaagagagatatccggatattaaagtgattatcctgacaacctttaacgatagtgaatacatttttactggactgaaaagcggtgctgatggttacatactgaaagattctgattcacaagaaattattgattccatcaaaacagcatgtgaaggcaatattctgttaaatcctaaggtaacgctaaaagttgtaaaggctctaaattcggtagaacataataaagagcttgttcaagaaaataatgaaaaggaacagctggtgcaattgcttactcccagagaaaaagaagtcgctaaacagattatggaagggaaaagcaacaaagctataagcgaagcactgtttattactgaaggcacagtcaaaaattatgtatcaagaatactggaaaaacttcaaatgaacaaccgaacggagcttagcttatatttacaaaagcatatgtgattcaacttttttccttcaatcagaaaggaatttcatcaaattcctttcctccattttcttctgaatatatccggacttacaccttccgtatatgactaaagtaacgatgcgattcgtaactaaagtaataaggtaaatgagtactatagtaaattctaaaaatattccattcaggttaaaataaaagaaccgaaataccacgaggggtgttttaattatgcttgaattaaaaaaacttaccaaaaaatatgatgactttacggcagttaataatatttcgctgactgtagaagatggagaagtattcggactattgggtcctaacggtgccggcaaatcaacaatggtttctatgattagcactgttcttgcacctaccagcgggacaattaaagtagataataaatcacttaaggaaaaacctattgagataaaaaaaataatgggggttgttccacaggatttagctttatatgaaacgttaagcgccaaagataacttgaacttcttcggaagcctttacgggctgaaagggaaaaagctaaaagaaagaactgatgaggttctggagattattgaactgacagataaaaaaaatcaaaatgtatcagagttttccgggggaatgaaacgccgggtcaacataggcgtggcgttaatgaataatcctaaattattaattcttgatgagcctactgtaggaattgatccgcaatcaagaaatcatattcttgaaacagtaaaaaggctgaataaagaaaaaggaatgactgttatttataccagccactatatggaagaagtagagtatctttgcgagaaggtggcaattgttgatcatggatctcttattgctttaggaacgaaagaagaactcaaggaaaacttaaatgcttgtgacactttaactgttacttttaagggtgctgatgaagaggcactcagccggataaacagcattacaggaattgataaagtgacggtagatcataaacaaatttcaatgcttgtatcgacgaaggaaagaaacatcattgaaattgtagatgatatcaaaaatctggggatcgacctcactagctttaagtacgaggaagtaaatttggaaagcattttccttcaaattacagggaaaaacctaagagattagtaggaggaggctatcttgagaaaattattcaacttattttttcttgattttaagctgttaacaaaaaataagtcattttatttaaagctgatgctgtttccatcactgctaatcctcatattgggcagtgtgttcagtaattcagattcaaaaatcgaagcatttgatgtagctttttactcagcagattcaggagagagtgtttctttaggtgatgtcttaaaggataaagtttttaagaaaggagatctcaaagatatcattcatttaaaagaagctgagagctacaatgacggtgaaaaattagttaaagaaggaaaggctgcagcttttatctatgtaccggaacactttacgaaagccgttatgaacaacgggaaaacaaatatcgatttaattggagataataataagaccatagataaaaatattgttcaggctgttttggagggctttacgaaaagcgtgaaaacaatgagtgctgagcaacaagaagtaataaaacatatcagccccggcggcagcgtaccaaaagaaaaaatagaaaaaatgatgaacgatttggccgataatgacgggatctccgctgatatcccaaaagcagcgacaaataaaaatgcggttcctgtcgattccatgcagtattattcaattgcaatggttgttatgttttccattatgacggcttttgtgcttgttcatagcattgttgatgagcggcagaataatacgctgttcagaattaaatctacaccgactttaaatattcagtatgtgcttggaaagttgacaggtattatttttgcgatcttaatgcagatgactgctgttattctgataagctgggtcgtattccgaatgaactggggcaacttgtttgatatttttgttattacggtagtatacgcatttgctataggcagcattgtattgttttggggttttaccgctaaggaccacgtggcggtgtccagtatggcttctccggttctttatatttttagttttttgggaggcagttttattcctaagaacggactgcctgatagcttgagggttgtccaagagatcataccgaacggtaaggcaataaactcttatttaaaagtcaaacagaatattggccttagcggcatgtatattgatttgcttgagctaattggtattggtctcatctttgtctttattaatattatggtattcaacaggaagaaggtggcgtagtagtgcaattgattgccatgattaaacatcagctgaagctgatgctccgaaatagattagcaatttttgcaactatttcagtgccgttaatccttacatttttgttctctttttcccaagatacggatagcaaagagaacttgtatatagccaatgctgataaaagcaactatgctgcaaagctcattgaaatgataaaagagcataaaaatattaaagttataaagctaacggaaaatgaaataaagaaaaaagtcgatgatcaggatattccttttggggtcgttattgaaaaaggttttggaaaggaattggcggacaatcacaagataaaaatgaaaatcatccaaaactatgagaacggcagcggaacattgttagagcagctggtcaaaaatgaggcgggaactcttaaaaaggtagttaaagattcgcaatatatgtctgcgcagttgcatacggactcaaaagatatagaaaagaacattttcaagaaattgaaaaacaattcaggaatagaagtgaatgacaaaacattaagccagggtaaacatactcaggataatgcgaccgtgagattaattggttttcttgtaatgtttatttggtttgttgttattcaagggttaagaacacttattgatgaaaaagagaataatactttcagccgattactaagtacgcctataaactatacaaaatatgttttatccaaaatggctgctacttatatttccggaatcattcatataatcgttataatacttgcgggaaaatacttactcaagatcagcataggtcataacatctttgccatcgctgttatgctcgctgtttatttatttgcattgacctgcattacgatgattatggttccatttatgagaagccaaaagcagtttacttctgccgcatcgatcataattgcagtaagcgggatgataggcggttcctttttctcattggaaattgctccaaaatatatgcaggttatttctaaatttacacccgaagcatgggcaatacagtctttaaacaacattatctttagtaagagtaccttaggaactgaatggcttccgatcgtaatttttgcaagtgtcggcttattaagtattattgtatctttcatcttgataagcagggagattaaaaaagaaaattaaatcaacaataatcggataaaattaacagatcaaaaaggacgtgaggaaattgggtatggaagaactatttggaatggctgaattaattataggtgtactcatgaatgtatttatcggtaaaatcgggcaagttgcttttggaaaagataacagaacaacaaggatcattttaagagtaataggaatcttcctcatcatcaacggagtttcaagagcatttcatatataaaatgagatagtaaaaacatccttttcagggtgtttttttatcgggttattacaaaatttctgaggtgaattatgaaaaaaatattttgtcttccgtatgcagggggatcaagtgcaatatactataaatggagaaggttaatgagtgactctttaacaatacatcctattgagttaaaaggaagaggtacaagaattaacgaagatttttatgaacatatagatgaggctgttaatgatatatatgatctgataaaggatcaaatcagggagtgtgattatgctttattcggccacagtatgggaggccgattagtttataagttatattgtaaaattgctgaaatgcagcagaagaagcccaatcacatatttttttccggatgcggcattcctaaaacgaaaaaagcagaggggatgattcatgctttgccggataatttatttttgcaaagaatcatggatatgggcgggacttcggaagaactgttacataacaaggaattacaacaattatatcttcctattttaagaagtgatttcaaaatgttagaaaaggatgttatttctgaaaataagactgttatggactgtgatataacagtgttgcatggtattaatgacaagacgataagctcagatttaatatgtaattggggacattatactttagggaaatgcaatttttatacgtttgaaggaaatcacttttttattcatcaattttcgaatgaaataactgacattataaataaaaccttgagataaattgttgattgaaaaatcgggagtgttactttgtcccggtttttttatgttaatacgaaaaataaaaactgggttaatgtgcttaggtgtttttccctgctaattgacaactcttaaatatttgtataatatttcttaaagatggctagttcttcttcattatcctttttttaaaaaaagtgtttatacgggtctatatcattaaaaaatggtttttgctgccgataaataaactgtcagactacaacaacaattattggtgagcgttattgcctgtgatgcagtttaacataaaaatccaccgaaagcctctgctgttttaattcagtgaatgaattgaattttgatatcaagtgaaggagtttttgttatgacaaaaagtataaagggagataaaaacagtattggtgagttaaaaactgaagagcattttttagtgggaagtaaatcttctaaagaaaaaagaatgaaaaatcttacatataaattgtcacagcaattaagcgataagctgaatgtatgctgcaatggatcggatgaacgtctgcatgtcgtattaacagcggcactgactttgttaataaatcaatatacagaaagacaaaatattgtaatcaagactcctgttttcagaaagaacagaacgattgattctgagcaagaaattttgactcttaaaaatgctgttcatggtgaagacctattaaaagagatcatacataaagtcgaattcaccgtagaacaggcattggaaagcccccaaaataattctcgaacaagtgataaaatgactggccttccttttgatgtcatgatagtccttgaaaatattcaagaatacatacttaatcaagaaaatcccgctattcatatcctattttcgtttataaaccagaaacaatacatagagacagccatacactataacgaatgcctctattctcaaaatatgataaaagatttgtcactgcgatttcagatgatccttgaagctatgataactcctgaaaatatcagagtgaaagatatgagattcctgaaagaaaaaaataagcaaaagaaaatctttggctgggaagataattattcgaaaattggaacaatttcggaggtgtttgagcagcaggctgatgaatattcggataagactgctttggtactagaaaactcttcaatgtgttacgcagaacttaatcaccgtgcgaaccagctggcacggtatcttcaggagtgcggagtaaaacggggagaccttgtcggaattgctttagaacgctcttttgatttgtatattagtattctggcaatattaaagtcaggcggtgcttatgtgccgttagaccctcaatatccgaagcaaagactatcattcttaatcgaagattcaggtgtagagttgctgattacaaacgaaagcattcagtcacaactcccgcctcacggggacggcgtaatctgtttggatggtatgaaagaagaaattgaaaagatggatggatctaatattggcataaaaggttccttggatgacctggcttatgtcatgtatacgtcaggctcaacgggactgcctaaaggagtaagtattgttaaccgcggtgtgattcggctggtgaaggagactgattatgcggtatttgatgagaatcaaacgtttctgcaattagcttctgccgcttttgacgcttctaccttcgagatctggggctgtttattgaatgggggatgtctggctataatgcctccgggaataccgacggctgatgatattgcagaagctgtaaaaaaatataacattacgactctttggctgacggccggtttattttctctagtagttgatcagcagttagaatcattaaaagggcttcagcaattattggtaggcggagatgtggtttccgttccgcatgttcaaaaagtattagcacttggaaaggtacaagtaattaacggatatgggccgacagagggaacgacctttacctgttgtttcccggtccctcatgattggaaaggcagtacgcttcctatagggaggcctatttctggtacagaaatattcattttagattcgcaattaaaaccggtagcgcctggtattcctggtgagctgtttattggcggagatgggctggcgcgagagtattggcgacggcctgatttaacgaaggaacggtttatatcacaccctttcaataatgatccttcagcacgtctttataaaacaggagacttagtgcgttatttagaaaatggcgatgtggagtttatcggacggcgggacgagcaagtcaaaatccgcggttttagaatcgagcttggggagatagaagcccgattgatcaatcatacagaaattaaagaagcggcagtaacagtaaatcataatggtgatgatgatttatatatctgtgcttattacacttcaaatcataaaatcgcaaagattgaattgcagcactttctgagagactttcttccggaatatatggttccatcgtactttaaacaaatggataacatgcctttgacggtaaatgggaaaattgacagacgggcacttcctcgacctgatatatctcaaatgtccgaaacaaaatatgaagcgccgacaaatgaaacggagaaaaaactttcggagatttgggaagctgtacttggcagggaacgcgtcggtatagatgaaaatttctttgaaatcggcggtcattcattaaaggcttctatgttaatttcccgcatcagaaaaacattcggcacggatataaaggtgaaggagctttttgagcagcctaccatcaaacagttgagccgtcttattcaaaagcgggataaacagaattatccggtcatcagtaaagcgagaaagcagtcttcttatcaagcgtcatctgctcagaaaagaatgtttgccctttgggagacggataaagacagtatcgtttataacttgccgattatgattgaactaaacggaaaattagatgtaaaaaaagccgaatcagttctacaagagattattggcagacacgaagctttacggacaagtttcgatgttgtaaacggcgatgtggttcagattattcacgatacatgggagctcgaatttgattatcagaagctgccgtctgatgggatacgaccatatgtgaagcagtttatcagaccctttcatttggacaaagcaccgttaatcagagccggactcataacgtatgaagaccggaatctgctgctgttagatgttcatcatatcgctgcggacggtgtatcggttggaataatccgcaaagaattcaatgcgctgtatgcggatcataaactaaaacagccgccgctgcaatataaagattattcagaatggcaagtaagctcaggaacaaaagaggcgttaaaggaacaagaggagtattggcttaagcggttaagcggagatctgccgattctcaatctgcagactgattacgagcggccgagagtcaaaagctttgaaggaagccgagtcagctttacggccgatgaaaggttaacatcaagcttaaagtcggtggcgaaagaaacaggaacaactttgtacatggtgctgctggcggtatataatatcatgctttcaaaatacagcggtcagcaggatgtgatcatcggaacggcagagtccggaaggtcagacaccgaactggagaatacggtggggatgttcgtcaataccgtcgccataagaaattttcctgaggaacataaaacattcagagcgtttttagaagaggtcaaacatcatacgttaaaagattttgagaatacagattaccaatttgaaaatattgttcaaaaactcggggtaaaaagagattcgagccggaacccgctgtttgatgtcatgtttacttttgagagtaaggattacggattcggaggaaatgaagagacagcagaatcaaatttactggtatctgaggtcaatatatcaagatttgatttaacgttaactgcaatggaaaccgatgaaggcgttaacttccaattggaatattgcaatcatttattcaggaaagacacagtcgaaagaatgggtgctcattatacccggcttttacaacaggttgtatcagaaccggacacggcaatctgcagactgaatatgataacggatgatgagaaacataaactgctttatgtattcaatgatacagcagccgacttcccgcataataagacaatccatcaattgtttgaagaacaagcggaaaagacaccggaaagaatagcggcagtgtatgaaaataataaagtaacttataaagaacttaacgaaagatcaaatagtctggcgagaatactaatgaaaatgggggtgaaaaaagagtcaatagtaggtattgttgctgacaaatcattagagatggtgttaggcatattgggtgtgctgaaggcgggaggcgcatttttgccaattgatccgggatatccttctgagagaatcaaatacatgattgaagacagcggttctgacattttattagtgcagaatagtcaggctgacaatattccgtttgacgggaaggttattgatttaacagatagttctctttacaccggagatcggcataacctgccaatgatgagttccgcagaacatcttgcttatgtcatttatacttctggaacgactggaaaaccaaagggtgtaacgatccggcatatcggaatcagtaatctcaaaagtgtctttgaacatgatatgaatatcaattaccgggataaaattattcaatttgcaagtttttcatttgatgcatcagtgtgggaaatcagtatggcactgttgaccggagcggaactacacatcctttcaagtcaagtcatcaataattatacattatttgaagagtatattaaccggcatgacattactgtagccactttgccgcctgtatacatcaaccatataaatataaacggattatcagctttaaggctcttaattactgctggttctcagatatctacaaaatccttgaaccggatcgtgaataaaatagactatattaatgcctacggtccaactgaaacgacaatctgctctacaatgtggagatactcagaagctgagagggcgatggcaaagaccattcctatcggtaagccgatcagaaatctgaaagccttcataattgatcacaacaacaatcttgtgcctattggtttagcgggagaattgtgtgtgtcgggtgacagcttagcaagaggatatctcaataaagagaaaatgacgcgtgagaagtttattgatcatccatttgagtccggaactaaaatgtaccgaacaggagacttggcaaggtggcttcctgacggaaacatagaatttttggggagaattgataatcaagtcaaaatcagaggcttccggattgaaactgatgaaatagaaagccagcttctgaaaataagcgggataaaagaagcagttgttatagataagtgcgaccttcacggtgacaaatacctttctgcatttgtaaccgcagaatataaaatatccggagcagctttgagggagcaattgggtgacattttgccgcaatatatgattcccggtgtcatcatccaggttgaacagctgcctctcacaccaaatgggaaaattgacaggaaagcacttgcagaaatagaagagcctaaacatataaaggagcaccttgaagcaccccgttccgaagtcgaacagattctggtaaatgtttggtcggaagttctgaaaattgatgatattggtattaatgataattactatgagctgggcggagactcaataaaatctatactgattgtatcaaagcttcaaaaatacagtctcagtctagaggtaaaagatcttttgcagtatccgcaaataaaaaacctcagtaaacacgtgaaattatataaagctcaaacagatcagagcccggttagcgggagaactgaactggcaccgatacaaaagtggtttatagagaatgactttgcggacattcaccactttaatcaggcattcatgtttcaagtgaaagaaaaaattaatgaacacgctctggcaaagacatttgaattattagtaaagcatcatgatgctttgaggttgatatatacagccgaaaatgacgaaataaaacaagaagtcagagatgtccaagccgcccgggatacttttactctggacatatatgatctgcttgctgatacggattacaaaaatacaatagaaaaacttgccgatcagttacaaagcggaatggatcttgaaaaaggacttttaatgaaacttggtttatttcgaacaatgaggggcgattatctacttattgctatacatcatatggtgattgacggagtctcttggagaattctgcttgaagatatggagcaggtctacaacaatctgcaaaaaggagagccggccgttcttccgccaaaaacggcatcctttcaagaatggacacgtaaattggcggaatatgcaaacggaagtgagataagaaaggaacttcggtattgggagaatatcgagaaaacgaagattaaagaaattccgagagatttcaataaaactgacagtgtatttaaggaaagccgcaccattactgtcagtcttacaaagcagttaactgataagctccagaggaatacaaatgcagcttataacacacagattaatgacatcttgctttgttcactgggaatggcagtaaaagaatgggcgggacttgacaaggttttaatcggtctggaaggccacggaagagagaacatattagaaaatatttcaatagaaagaaccatcggctggttcacctcactatttccgatcgtgctggatatggagcacagtgatgatctgccttattgcataaaaaatacgaaagagtatttaagaagaatacctcataaaggtattggttacggaattattaaatacttgacggcaccggcacataaaaaagacatcagttttacgataaagcctgagatcgggtttaactatctgggagaaatctctcaaaaaaagcgggctgtttttcagcatgcagatatatcatctggtacaagtgtttctttatctaataaaaaattgaatgccatcgaaatcaacagctttattatggacggtcaactgcagttggaatttaactatagtacgaaagagtttaaagaagaaacaattaaaacattaaccgaatcctatataaaccggttaatcgatattattcagcattgcggaatgaaaaaaattcctgaaaaaacaccctttgactatggagatctggatttatccatcggagatttggagcagattttatcaagcggaaaagagatagagaaaatccactccctgactcctatgcagagcgggatgctttatcatgcattgcttgatccgttttcacaagcctattttgagcagcttacattttctttatccggtcagcttgatattggcagattaaatacagcttttaatatgctgatcgagaagtatgaaattttaagaacatgcttttttcatgaaggattaagtaagtttaaacaggctgttctaagagagagaaaagttaaaattgaatttgaagatatcagcactttctcggaatatcaaaagaaagtccggcttaaaaatgtccagtttaaagacaggggaacgagattcgatttgacgaatgattgcttaataagagtaaccgtattaaaaactgatgagaaagaatataaactgctgttcagttttcaccatattattatggatggctggtgtatgagtttaataatgaatgatataaaaactatttatacgtcattaaaagaaggaagagagacagtgcttcagcataccgagccttacagcacctacttagaatggctggataatcaggacaaaagtgccgcattagaatattgggggattatctaaatgaatatgagcagcaagccggtattccaaagttctgctgatgagggcggtttcaataataggaagaaaacattcattattgatgaaacatgtacttcgatgttgaaagctgcagctgatcaatatcacattactttaagtgcattgattcagactgcatggggagttcttttgcagaagtataacaacgtggatgatgttgtttttggtgcggttatttccggaagacaatgcagagtgcaaggcatagaaaaaatggtggggttatttatcaatgcggttcctctgagagtaaaaggcgatggtgatacggtatttatagcattagcccaaaagctgaacagtgactttatcaaagcgaatacatcatacggttacagttctttagcggatatacaagctcttacaaagatgaaagagaaactgatcaaccatatgttggtttatgaaaattatcctgttgatgactatggcaaggcggtcgataatacaactgatgctttaaggattacagatatggaagtgtttgaacagacgaactatgactttgggctggttattattccaggcagccaaatcaaagcagagatgacgtataacaataatgtttatcgtgaagatatcattaatcgtataggtgttaatttctgtcatgtgttaaagcaagtggcaactgatcctacgcgtgtcctgaaagacatcagcgctgtaaatgaagaagagcgcggaatgctccaggattttaataagcagtcctctaattatacggtgaataaaacgatacaagacctttttgaagaacgagcggaaaagacacctggccaaacagcggctgtctatgcaggaaagcatatcacttataaagagctaaacgaaaaggcaaatcaagttgcaacattattaatggaaaaagggcaggaaaaaacagcattacggctatgatgatccgtccttcagaatattcaatgattgggatgctgggaattttaaaaaccggaagtgcgtttctgcctattgatgatgaatcaccggtcagtcggataaatcatattttaaaagatagcaaagctgatatcctcattacagatttgtgctttttagctgataaaaacattgcggcggaatgtttggatattacggataaatcgatttataccagccaaaatacatcaaaccctgatgttcagtatgatctcgaggacgaggtatatgttatatatacctcgggtacttcgggaaaaccgaagggggtgaaggtgaaaaataaatcattagttaattattcattatgggtatgtgatcaaataaacataaattctgacagcaggtcgttagtgacgtcaaaatatagttttgacttatgctataccagtatatttccagttttatccggtggcggacaagtccactttgttgataaagaagtgtatcttcactctctatcattaatagaatatattcataaaaatagtattacatatcttaaaatgacacccactttattttcaacattgatggaggatgttgacatgctggcgtcttgtcctgatttaaaagttattatactgggcggcgaaagcataaacatcggcaacgtcaaaaagctcgctgaaaaatgcagatggatgaagtttattaaccattacgggccgaccgaaagcactgttggctgtattgcacatagcattgatctagatcatattcaaaactgtgaaatatacaatagaataggaagaccaattcacggtattaatatctatattgtggatcgttcagatcaactggtccctgtgggagcacctggtgagatttgtatcagcggggtaggtttagcatcgggatatgtcaataatgaagaattaacgaatgaaaaatttattgataatccttttcatcgtggagcaaaaatgtacaaaacaggagaccttggcagatggatgccggatggaaatatagaatttttaggccggattgacaaccagatcaaaattaggggttttagagttgaaatcggagagatcgaaaaccaactattacagctggaaggtataaaagaagcggcggttgtttatatagaggagaaatatctttctgcatatattactggggacattgagatggaaggctcgttcgtacaggagaaattggcacaggttcttccgaagtatatgattccgagtttcataatacaactgaaagagttgcctcttacagctaacggaaaaatcaatcgaaaagagctgcctcttcctgacttgcaacggttgtcagtacctcaatacgaagctccggcaaatgaaacggaagaaaaactagctgaaatttggaaagaaatgcttgggcataaacggatcagtataaatgaagatttcttcgaactgggcggacattctttaacagctgcgttcactatttcccgcatcagaaaaacattcggcacggatataaaggtgaaggagctttttgagcagcctaccatcaaacagttgagccgtcttattcaaaagcgggataaacagaattatccggtcatcagtaaagcgagaaagcagtcttcttatcaagcgtcatctgctcagaaaagaatgtttgccctttgggagacggataaagacagtatcgtttataacttgccgattatgattgaactaaacggaaaattagatgtgaaaaaagccgaatcagttctacaagagattattggcagacacgaagcgttacggacaagtttcgatgttgtaagcggcgatgtggttcagattattcacgatacatgggagctcgaatttaattatcagaagctgccgtctgatgggatacgaccatatgtgaagcagtttatcagaccctttcatttggacaaagcaccgttaatcagagccggactcataacgtatgaagaccggaatctgctgctgttagatgttcatcatatcgctgcggacggtgtatcggttggaataatccgcaaagaattcaatgcgctgtatgcgggtcataaactaaaacagccgccgctgcaatataaagattattcagaatggcaagtaagctcaggaacaaaagaggcgttaaaggaacaagaggagtattggcttaagcggttaagcggagatctgccgattctcaatctgcagactgattacgagcggccgagagtcaaaagctttgaaggaagccgagtcagctttacggccgatgaaaggttaacatcaagcttaaagtcggtggcgaaagaaacaggaacaactttgtacatggtgctgctggcggtatataatatcatgctttcaaaatacagcggtcagcaggatgtgatcatcggaacggcagagtccggaaggtcagacaccgaactggagaatacggtggggatgttcgtcaataccgtcgccataagaaattttcctgaggaacataaaacattcagagcgtttttagaagaggtcaaacatcatacgttaaaagattttgagaatacagattaccaatttgaaaatattgttcaaaaactcggggtaaaaagagattcgagccggaacccgctgtttgatgtcatgtttgtacttgaaaatgcagattacggtattgaaaatcacttggatccaaatccggaagagcatattcaaaccgagatcaatatttcaaaattcgatttaacgttaaccgcgacggaaattgataaaggaattaagttccacttggaatactccagtcaattatttgaaaaagaaacagccgagagaatgggtgcccattttacgaagcttttacaaagtgcagctgccggcctagatcaacctttaatgaaactggatttgattcctgaacaggagaagcacacattgctccatatattcaatgacacggcagctgaatttcctcggaataaaacgattcatcaattatttgaagagcaggcagaaaaaacacctgaacgtattgcggctgtccaagaagatacgctattaacctataaagaactaaacgagaaatcaaacagcctggctaatcttttgagacaaaaaggaattagagaaaacagcattgtcggaatcatgacagagagatctcttgagatgatcatcggaattatcggggtgctgaaagcagggggagcgtatttgccgatagatcctgaatatcctgatgaaagagtaaattacatgctgaaagacagtgatgcaaacattctcctaattcaaaacggattgtcaggtggtattacattcaataaagaaattttatcattaagtgatcctactctatatatgcataacagaagtaatctgccgaatgtcagttgcccggaagaccttgcctacatgatttatacttcagggactacagggctgccgaagggcgtcatggtaaaacataaaggcgtggtaaattatattcattgggcaaataagatatatgtaaatgatgaagatattgattttcctctgtattcttctatttcttttgacttaacggttacttcaatttatacaccgcttatttcaggaaataaaattattatttatgagggaccggacaaggctcttctgatcagaagaattatagaagaaaataaagcggatattattaagctaacgccgacgcatttgagattgctggagaatgtagatttaagtacgtcaaagataaaaaaaataatcgtcggcggggaagagctgaaaaccgggcttgcaaaaaagatacacggtgcatttaacggtcatgtcaaaatctacaatgaatacggcccgacagaggctacagtcgggtgtatgattcatcaatatcatattgaaagagacaatggcaatgcagtatcaataggcaaacctgcggataatactaagctttatatattaggaaaacaattggaattacttcctttaggggcagccggggaactttgtgtcagcggagaaggacttgcagacggatataaaaataaagcgggcttaacgtcagaaaaatttgtagataacccctttgaacccggggctaagttatacagaacaggggatatggcaaaatggatgccggacgggacaattgattatttaggaagaattgatgatcaagtcaaaatcagaggatatcgtattgaaacgggagaaatagaaaaccggcttctgaaaatgagtcacataagagaggctgttgttgtagcgagagatgaccaacatggggataaatatctctgcggttatgttacttccgacaaaaaaatagatgtttatgctttaaaagaaaatctgtctaaagaattaccgttatatatggtgccaagttatatcttccagattgaaaaaatgccgttaagttcaaacggaaaaatagatacgaaatcattgccgattatagatattgcggatgtattggagtctgcatatgaagcaccgcgaaataaaaaggaacaaattctcgcatgcgtatgggagaaagttctggggatgaaatcaatcgggattaactataactattacgagatcggcggagactcaattaaatcaattttagtagtttccgaactccaaaaatacggcttaaaactggaagtcagagatttaatgaaatatccgcacataaaagacttgagtgctcacgtaaaatcagctgatatacaagcagatcagtcgattgtagaaggagacgttgatctgacaccgattcaaaaatggtttatagaacagagatttgaacaagaaaaccactataaccaagcctttatgctttacaaaaagtccggcatagaagaaaaagcaatcgaaacggcctttttggaactggtgaggcatcatgatgccctcaggatgcagtttaaaaaggaaaacggtgaaattaagcaatggaataggggcattaaacaggcaaaagaaacatttactttagaagtatttgatatgacacaaacagaagatccagccatggcaattgaatcactggctgaccgtatgcagaacgaattgagcttggaaaaggggattttaataaaactggcggtatttaaaaccaaaaacggagatcatcttctattaaccattcatcatatgatcattgacggagtatcttggagaatcctattggaagattttgaaacagcttatcttcaaacagttaatgggaacaaggtggagctggaaactaaaacagcatcgttcaaagaatgggcgcgtcaattgaaagaatatgcaaacagcaaggctcttcaaaaggaagctgggtactgggagaccatagaaacggctattattgaacctcttccaaaggatttcattgccgaaagctgctcttatgaagatagtaaagaaattaaaattgaattaacagaggatcaaacaaaaacacttttaagaaatacaaatgcagcatatcatacacaaattaatgatatattgctttgctcactgggacttgcagccaaagaatggaccggcaacgagaagatccttgtgaatcttgaagggcacggccgtgaaagtgttataaaaaccccggtccatcgcacaataggttggtttacgacaatatacccaattgttctcgatatgacggaaagtaatagtttatcaagctccattaagtatacaaaggaaatgcttagacatatccccataacgggattggttacggaatactcagatatttgtcggactcggttcatcttcaattaaaacctgatatcagttttaactacttgggtgaatttggccaagaagatcgcagcaacctatttcaaatatcacctttgtccgccggaacgagcatatctggaagaaataaaaagacacatagtatagaaataaatggatatatcatggatggcaggctgatgtttacgttcaattacagtgcaaaccaatataaacgagagacgattgagcaatttacgaaagcctatcaattgaaaataaatcagatcatagaacattgtgtgaataagaaaatatctgagaaaactccatgggattatggggatcccgatcttcaaatagaggagctaaatcaaattcttgcaagcggtgctgaagtagaaaaaattcattctctttcaccgatgcaggaaggcatgctgtataacgctgtgattgaccatcaatctagcgcttatttcgaacaaagtgaaataacagttgaaggaaatctgaatacagaagttctcagtgacgcattaaacaggctgattgctaaatatgaaatattaagaacgtcatttttctataacggtttccgtgtatttaaacaagccattttaaaagaaagaaaactaaacattcaatatcatgatatcagccaatgggaggagcagaagaaggatgcctttgtagggcaattcaaggtgagagacaggaatactccgtttgatctgaacaaagattgtctgatcagagtatcggtgatcaagctgggaagaaataaatttaaagtcatatacagtttccaccacattattttggatggctggagtgtcggtatcctgttaaaagagcttatggatctatatggtgacgtggctgaagggaaaaaactccttcaagaatcacctgtaccgtacagtcgttatcttgaatggcttgatcagcaggacaaggaccgtgcatttgaatattggaaggaatatctttctgcatatgaacaagagatctcatttccggaactggaattgaaatctgacgagtatcagcatgatcaaaaactgggagcgcttaacggtgaaaccgccgctaagctgaaaaaaatcgctgagtcaaacagcattacattaaattctatcgttcaaacagcatgggggatattgcttcagaaatataacaatacaaatgatgtggtatttggttccattgtttcaggcagaccgagtgagataaacggaattgaaaatatggtcggcttatttataaatgcagtgccaatcagagtgaaaagagaatgtgatacatcatttatttcattggctaaacaaataaataaagactttattgaagcgaacgaatacagttattgttctctggcagacatacagtctttgacaagtatgaagaataaattaatcaatcacgtagtcgtgtatgaaaattacccgttgagtgaggatcttttccaagattcagcccgttcgagtgtaaaaataactgctgaacatgggtttgaacaaaccaactatgatttagagcttttaattgctcccggtgacgacttgcatatgaaaatcacatataacgccagtgtttacagtaaagaaacggtaagttcaatcttagataacctggttagcatcttacagcaggcagcggctgatcatgaagtaatagtttctcagatcgatatggtaaatgagacagagaaacaaaagctggtgaaagaattcaactgcacggaattatcatataagaaagaaaagacgttacaagagctcttcgaagagcaagctttaaggacacctgatgcaatcgctctggaatggaacggagacttcttgacctataaggagctgaataataaggcaaatcaattggcaagagccctcagggaaaacggcatcaaagagaatgttgtggttcctattttggtaagaaggtctttccgattgattataggaatattaggaatactaaaggcagggggatgctacttaccgcttgatcctgattatccggcagacaggatcaattatatgctgaaagacagtaaaagcggcctgctgttaactgaagaaggacttccaaatgaattaacgtacagcggaaccatatttaacatagattcagaggatttattacatcagttggagacgaacattgatgttattaacagggccgaagatttagcatatgtcatttatacgtcgggatcaaccggaaaaccgaaaggggtcgccgtagagcaccgtgccgttcataactttattaagggaataacagacaggatcagcttttcacaagacaatgtccttctttcggtcaccacgtgctcatttgacatattcggattagagtcgctgctgcctttaactcaagggctgaaagttgtcatagccggtgaagcggaacaaagagatccgtacttgttaaacaagatcgttgttgagactgatgtcaatactattcagcttacgccatccagattaaagctgatgctaagtgcagaaaacagtacggagagtcttcagaaattgaagaccatcatggttgggggcgaggtatttcaacgggaattgttatttgagctaaaaaaatataaaaatctgaagatctataatatgtacggtccgactgagacgacgatttggtcttctgtgaaagacttaaccaatgaaaatagtgtaaatataggcaagccgattgcgaatacacagatatatatagtagatcatgatggaaacactgtaccgctcggcagtactggcgaattatgcattgctggagccggaatggccagaggatatttaggaaaagaagatttgactgcgcaaaagtttgtagacaatccgtttgttaaaggaaccaagatgtataagacaggagatttagcaaggtggctgccaaatggtgaactggacgttatcggaagaatggacaatcaggtaaagatcagagggtatcggatagaattgggagagattgaaagcatagtaaaccaacatgaaaaagttaaggaatgtgtagctgccggaaaaacaaattccgcaggagtccaagatttagttctgtattatgtggcagaaagcactgtatatccttcagaatttattaagttattatcacctgtgcttcctgagtatatgattccgcagatctttatgaaaattgaccaaattccgctgacagcaaacggaaaaataaatgtcctggcactgcctgaacctgttatagatagaacaggttttgaccggccttttgaggaagcggtaacggatgtacaaaaaagtatcagccgtgtttggaccgatgttttaaaaatagaagagcctggaatacatgataacttctttgaagcaggcggtaattcaatcaaaatcgttgcagtttataatgagcttcagaagctgtatccaaaacaaattcaaattgctgacttgtttgcatatccgactatttacagattgtccgaatatatagaatcagctatagcctttgcggagatagcagtgtccttggaaaaagaaatcattcctattactttaccgcttgaatacatctcggaatcaactggacaaagtcatacagccatgcacgaatatgcggtaaatgcgaattattatgatggtttaaaaacaatatgcaatacctacaaatatgatatttctcatgttttattagcgggttatgtatttttattagctgatgtcagccagcaaaacttggttcatatccaattttcgggtcatggagatgatcggatgagtcagctgtcttttgatctgtctgatatcgagaattttcacgatattattcgtatggcgaaggagcagattgagaatcaagaggattcacaatacgatttgaatactcactataagaaatcaagttcggcccaagatgtttttcctcttttttatattagtaatgaatcaaaaaaagagtactcagaattatatgatctggtttttgcagttcatgaaaagccatccgaagcagaaatcgtttttatatataaccatcagaaactaaatgagcacaaaatgaaagatttattttataactacatgaatttgattcaagtgattacagcagacaaagcagacaattcaatataaagcggccggttctgccttacattttgctgatcggcagaatgtaaggcaaatcaggcattatagggactttggaggtatttaaatgtcgaaaataggttttttattttcaggacaaggatctcaatatgcaggaatgggcaaacgtttatgtgacaattttattatcgctaaaaaaacgtatgacgaagccagtgatgcattgggatttgacctgaagaaattatgtatagatggaagtgccgctgagctatctcaaacagaaaatactcagccggccatcctggcaacaagtattgcacaattcagaatctacatggaagaggtcggaaaagaacctgaatatatcgccggccatagtttaggagaatattctgccttggtttgcagtgacgttttggatttccaggacgctgtaaagctggtgagagccagaggattattaatgaaagaagctgccgaacaagggaccggagcaatggctgttatcaggaacctggatgaaagaatagcagaagaagagtgcgaatctctctcttcaagaggaaaaacgattgctgtttctaactacaatggatataaagatgttgtggtatccggagaagcggcagcagttgaagagcttagtgaaactcttaaagccagaggagcagacatttttaaattaaatgtaagtgctgcttttcattctccgatcatgggttttgctgcggaaaaattcagccatgagttaaaaaagtatgatctcagaactccaaaatacaaagttttatctaatgtgacggctcttccatattcagataaacagcaaatggctgacatactgggaactcaaatcgtaaaaccggtaaattggatgggaatcatgaagtatttagaagcaaatcatactgatactgtgattgaatttgggccgaaatctgtattaaggaatcttgtaagaaacaatatcgctgacatcaaatcgtacagctacgacaaagaagaggacgtgaagattataaaagagactcttttgaacgaatctgtttcactgcaagccggtttttctattatctcgagaagtttagggatcgcggttgctactaaaaattacaactggaacaatgaggaatacgccaaaggtgtaatcgaaccatatgaaaaagtagctgccatacaggctgaacttgaaacatcaggtcgtcagccgtcaagagaacaaatgcatatggcagtagaaatgctgaagtcagtgtttcgaacaaaaaaaacccctataaatgaacagaaaaaaagatttaatcaattattttctgaaacaaacacaaaaaaacactttgaagactttgaagtttgacaggtatgatcacctatctagtgattctcagcgaggtaaaaaaatgaaaacagactttataagtttaagtaacttaaaagcggccgcttttacaaatcaaactcctaatgtaaagaaacaaaaaaacgaggaagggaccaaagacatttccggagatgacattgccattgtcggtttatcatgcagaatcggcgaagccaatcacgtaaatgaatattgggatttacttttacaaggaaaagagttcatcagagacattcctctgaacagaaaaaaagatgctgaccagtcattaaaaaacagcggaaccaagtacagtaaagatgcagcctatacaaaaatagcctatatggatgagattgataaatttgattgtgactttttcagtatccttccaaatgaagcaaagttgattgatcccagacaaagattatttattgaaacggcctggaacgcattggaagacgggggttacggcggcggaaaattatgtgggacaaatacgggagtatacattggactcagcagtgacggctcaaatgaatacttcagattgcttgaaaaaggagatcaatcattactcggactggctaccgcgggtaacattaaatcagttatcgcaagcagactgtcatatatcttggattttaaagggccagcaatggtaatcgatactgcatgctcttcatcgcttgtcgccctccatacggcttgtcaggcaataagaaataaggattgcgatatggcattagccggcggagtgaatataaaagtattcccaaagacaatagaggagagcaggttaaatatcgggaattcttcatctgattttgctgtaaggactttcgatgattctgctgacggcacgaatagcggcgaaggagtcgctgccgtattgctgaagccgctggcccaagcgattcgtgatcatgaccagatctatgcagtcattaaggggagcgctgttaatcaggacggcagctcagtaggaattaccgctcctaacgcagcagctcaagaacaagtaatagtagatgcgtggaaaaatgcaaaaatagatcctaaaacaattacatatattgaagctcatgggacagggaccaaattaggggatccgattgaaataaatgcgttacaacgggctttcagaaaatatacagaccgaaaacagttctgtgcagtatcttcagtcaaaacaaacatcgggcatcttgatagtttggcgggaatagcgggtttaattaaagcggtaatggcattaaagcataaaaaaattccgccaagtttacattttaaagtgccgaaccgaaatatcaattttcatgaatcgcctgtttacgtcaatgactccgtttcagcatgggagagcagcggagtatacaggtgcggcatcagcagttttgggctgagcggtacaaactgtcatgtcattttagaagaggcacccgcagttgaaaaagtcgatcaatccgttttatctgaacatatttttactgtatcagctaggactaaaacatctctcgcgcacttgcttacagatcatattgattatttaaagagagaaacagatgtgaatctgggagatatatgttatacagcaaacactgggagattgccaaacaaatacagactcgctatggtaataagctctgtcgcggaactgctggaaaagctggagtttttatcatgctctgaatggaaaacgtatcgggagaaaaatatatactttcaatcgataacaaatcaaacaaagtttataggaaaaacgcatacagacagtgtgcagaatactcaaacaataaaaaatgtgattcaaagagtcagacaagacgtctctaatattccaacctctgacttacatattttatgtgaaatgtattgtgatggggcgaatattaactttgaagatctttatagcgagatgaattttcaaaaggtcagcttgccgacatacaaattcagcggaaaaagattatgggctgagctggctgcagacggcccttcagccgatgagaaaaaacaatctttattgagcaatcttgcagtgcagtcactgaatctggaagtgtatatatcccatttgaatgtcactgattattggtttttaaatgaacataaagtgaatgattcttacgttatccctggaacggtttatatagaaacagctagagaagcgggaagaaaatacttcggcgaacctgtcggcattctgttaaaagacgttacgttttcaaatcagttaaaggtaaaagcaaatgaagttaaagaagttcatacgatcataaagaaaaaggacagcgttttagagtttagtgtgataagtaagaccggcgataaatggataaaacacgcggaagcggtcattgcgaaagaagaaccggtacgggaaacatatgacattgaggatttaaagaaaagctttaattctgtttatgtcattcaacgtaataatcatccattgacggaaataaacaccgatgaatacaagtcggtttatcatatagaagataccaatagaccggaaagcatcgttcaagtcggaggcagatggaaatgcaccaacgcaatctacagagacgacgacaggcttctatgtgaattggaattgccgaaagaatatgagagtgatttcgttcagttttcgcttcatcctgcgatgatggattgtgccgttaatgccgggacattcacaatagataacgaaacctatctcccttatttttataaagaatttaagatttatggctctgcttctaaaaagttttacagttatatcaagaaaaagagccgaagcaacggggaaacaggaacgtttcgcatcgtcctgctgaatgacactggagaagttttcggtgaaatcaacaattacatcgtaaaaagggtgcataaagcagctgaaaagactaaaagaaacaatatatatcataagctatcttggataagagaaagcgatcaatcacacgagatgcgagaaattcatcatcctattttattatttaagaataatggctgcagtttatccgaggaaatcattcgaaggttagaactggaagggaaaactgtgattgtcgcggaacagggtgactatttctctaaaatcggaagccatcattatactgtcagtgattctcaagaagattatgactgtcttgtaaaagctcttcaaagtgaaaaggtttctcagattgtccatttgatgtctatcagcaatgagaaagacaaaaacatatatcagcttcagaaaaaaatatcctcaggggtagacagtttattttatttaacaaaatcacttgtagaaaatacaaaaaataacatagaactgatgctgtttgcagaccttgcacatcaagtaagcggtgaagaaccagacattaacccgcataacgcggcatttttcggttttggaaaagtaattgaaaaggaatattcgcgtgtaagtgtcagatgcatagatttggatcaaaatcttatggcggaaagcatcttgtttgaaatcaactcaaaaaaacagtcagagcttgtcgcttacagagaccggcataaatacgttcaagagctccagactgaagacttatccgtaattcgggaagggaaaataagcatcagaaagaacggtgtatatgttattaccggcggtatgggcggactgggattagaaatggccaagtatttatcatcaaaagaaaatgtccaattaatcctcattggacgctccgagcagcagatcaacatggagaagggaaacaacaagaaaatcgatgctctaaaagaaataaaagaaagcggttctaaggtagattactataaggcggatgtcgcaaatgaaagtgaaatgattcatgtattcgaggaaataaagagtaaatacaatacaatccacggtgtcatacatagtgctggtgtttctggagatgggtttattttcagaaaggaaaaaaaagtgtttgataacgtgctcagaccgaaagttaatggaacatggatattaaacgagctgacaaagcatgagcatctggatttcttcataatgttttcttctatcacagcacttgcggggagtatggggcaggctgattatactgcggctaatgcctacctggattcctttgcagaacgcagacagcgaagaagaccggatgaaaaaacagttacgattaattggtgcggctggtcggatgtgggcatgcttgccgaatatattgaagagcgtcaaaaggccggaaacgaacataaagatgaaaacggctttaagacgattacctcagctgaagcgatacgtgccttcgatgaagtcatgcaaaaggacatccggaatgtgatcatcggggaaattgatcatcgggtactggaattaaatcaagatcaaattcatttccgattatctccggatattttgacttttaaggagcaggcgattgtaaaaaaatctgttgagtcgaaaaccgatcagacatttagcttcagcgatattgaaaataaactaatgaaagcttggataaaagttttaggcttagaacaaatcagtataactgataaattttatgatttgggcggagattcaatatccgcgatatatctggtaaaagaaatagagaaagaatggccttctctcattgatgtttctgatatttttacgtatccctccattaaggagatgtcaacctaccttgaatcccacttcagtgatcagaagtcttctgaccgaatccctgaagaagacaatgaagatgacctggatgcaattttgaataagctggcatccggagagatggaagtcagcgaagcaaatcaaatatttcatccagaccgaaaataactgaattgggcctgtaagaatatattcgcaaaatggatattggcaggctgcgaattgaatgaagaaaaagcagcctgcctatcctatcacattattacgggaactgaattccattttaaggtaaaaatgtagatcttattacccttcctatcaaaaattttcttagaaagaaagcgggagtgatccgtaatgaatagcgttcaatcttatatatttgaacaagtgaaacagcataagctaagccagaaagaagcaaagcgaatgctaaaagaattaaaggctgcaagcagcaatgaagatattgctatcattggaatttcctgcagactgccgaaagcaaacaatacagatgaatactggcagaatctgatgaatggagaagactgcaaagcggaatatccaaaagatatgatcaattacattaaaccgatcgtaaacaataaagggtttactgattttctcggttcaggatatctgacggaagaacaagcagataactggaaacctggcggatatttagaagacgtagacaagttcgatcctgaattttttaatatttctcctaaagaagcaaaggccattgacccgtctcacagagtattgctggagacggtatggactgcgattgaagatgcagggtatgcaggggacaaaatttatggaagcaacacatcgctctttgttggaaaagaccatgtcaataatacgttgtaccgctacattacagaatcagaatcgacaagtatgacgggcaactggccgggtttgatggcggggcggattaattatttattaaatttaaaaggaagttctatggttttggattctgcttgcagctcggggctgcttggtgtgcatcttgcctgtaatgctttgaaaaataaagaatgcgatatgtctattgtcagcggaatttcattaggattctttccgcgcttcaaaacgtccaaaaaatcaatgatggaatcagtaagtgataaagtacactcatttgataaagacgcagacgggacatttttcagtgacggagtagctgcagtcatcttaaaacctttaagtaaagccaagcaggacggagatcatatttatgctgttatcaaagggagtgcagttaataatgacggggcctcaaatggattgacagctccaaatgccatcgcccaggaagaagtactggttcaggcatgggaaaatgctcaaattgatcccgaaaccattcaatatatcgaagcgcacggtacaggcacaaagcttggagatccaattgaaataaaggggatttccaatgcgttttcaaaatatacggacaagctgcagttttgcgggatcggatctgttaaatctaatattggccataccgttgccgtttcgggtttggcgtcacttatcaagatcgttctgtctatgaagcatcaagtcatccctccgagtattaattttaaagaaccgaattcattgattaactttgtgaagtcacctgtatttgttacagacaaagcccatgaatggcctaaaaataactcaccgaggagagcgggaatcagttctttcggctttgtggggaccaattcacatgtagtgattgaagatgctggagatgaggttgaagaggtcattcctgcaaatgaaacatttgagatatttactttatcagctaaaacagagaattctttaatgaaactcatcaaggaatataatgaattctttaaaaaaggaactcaaaaaaacgtaaaacatatttgctatacagcaaacacagggcggggccattacggctaccgattggctctgattgtaaaaagttacgaagaattaaagagaaaaatcggcaggcttgcagggcataacctgaatgaaatatcagaaaaaggcgtatatttttctttccataaagttggttctgatagaaaacagattatggatgaaggagaaatttccttatctgaacatcgcaaaatgaatgctcaatctgacaatttgatacatgacattcttactgaaggggatgaatatttactgctaaaccttacggaaatttgcaacctgtatgtcagaggagcaaaagtagaatggacaaaaatgtacaaggatgagcgcagaaagattgtcagtcttccgacataccaatttgaaagaacattatgctggggagaagtaaaagacagaagaggtcaagcgccgcatcagaaaaatatcagtcacccgctgattgaccagtgtttggctgattcaatgaatgagacgatctattcaacgacatttaatgtgaataaggattgggttttaagtgaccataaaatcatgggggcttgcgttattccgggaacgacttatatcgaaatgggaagaagagcaagtgccgcttactataaaagcaatcaattagaattacgagatattatcttcttcactccgttaacagtaaatgaggatgagaataagattgtacacacaatcattaagaaaaagaaagaatgtattcaatttataatagccagtcaggaaggagaaacctggattacacatgcagaaggaaaagcgtttccattaacagactctgtatcaatgtttgatttagactctgttaggaatgacagtaatagagagaagataaaagtcaattatgaaaataaaaatggtttaatcagcaaagtctttactttcggaccgaggtggctgaacttcaaagaagtcatactgggccctgatgaacaattggccgaattaaaattggctgatgaatttacagcagatttaaaagacgtctttttacatcccgctttgctagataatgcagtgaacgtgtttattggagaagatgatgacgatagtacattccttcctttttcatataaaagcgtgaagatttactcaagaatgccgcagcatttttatgcatttgtcaaaaagaacgcaagcagtaaagagacaaagctgtgtgatattcagttaatagatacagaaggaaatgtttttgcagaaatcaccgattatgtattaaaaaaagtaaatcggattaatgccctttttgaagaaagttctgaatcactttatcaattaaaatggatggcgcaagaagcttttgaagaagaaaaaacagaggtaacaggtcctatactgttatttaaagacaacatggaaatttataaatctatactggaacagttgaaaattcatgacgatgatgttattgaagtggagtttggggatgaatttcagaagataaatgggcggaaattcctaattagcggatcagaagaagactatgttcaattattgcatagcataaacgatcaaaatatcagcagcattatacatatgtcttctatcagccgccaaggaacggaatcattaacagatttagaagacatgcagaataaaggcgtatacagcctgttccgcttagtccggggattaagtaagaataagatgaaaagcaatattaatttgcatcttatttctgatcttgtgacagaagtgtccggagaagaaaatacaatcaatccattgggcgccgcgttgtttggtctgggacgtgttatttcgcaggagttccaaaatgtttcatgtaaagcaattgatattgatgaacatacttcaccggaaattattagtgaggagttaagaacaaaagggaaacactatcaagtcgcctttagggatggtaagcggtatatcagtcggttggatacggttgaaccgataaaggataagaaacacggcggtatggagattaaagaaaacggtgtctatatgattaccggcggcaccggcggaatcggtttggagatcgcaaagcacctggctggaaaacataacgtcaatgctgtattgctcaatcgctctaaactgcctgatcaaagccgatgggacgatatcattgctgatggaacggatttaaagctttgcagaaaactgaagtccatcagagctatcgagtcaatgggttctaaagttgattgctacagctgtgaagtttctgacttaaacagcatggagccggtaattgaagaaataaaacagaaatacggtacgatcaatggcgttttccattgtgccggagttgccggggacggtttcctctttagaaaagaagctaatatttttaaagaagtgctcgctcctaaaattaatggaacatgggttatcaatcatttaacgagagacgtagatttagatttcacgattttgttctcctcaattaattctattttcggaggtgccggacagggagattatacagctgcaaatgcttatttagattcctttgcttatatgcaaaacaaacaggggaaaaacacgctgtcaattaactggccggcttgggatgaggtcggcatagctgtcgattatggaattactgatgagagctctattttcagattattgacggtagaaagggctatttccgttttagaagaaatagcatcgaataagcttactaatatcattccaggtacattaaatatgaagctcctcgcttttgcgaaggatgaattgtcttttgaattatctgagcaaatcaaaaacaaattaatagataaaaacaggacaaaaaacgaagcagaaaaacgtcgaagaacagatactgaagatatagtgctgaaaggaaagggagaactttactctgataccgaaaaaagtattgcgcaaatgtactctatggttttggatatgcaagagctggatttatatgaaagctttagtgccatgggcggcgattctattatggcaacccaactgttaaaactgataaatcaacaatatcctgacattgtggatatatccgatatatttacatattcctctgtagtggagctatcagagtatattgacaagcagctgaataaagatcatcagcaagaaacggaagaagatactgctgaaaatcggcttgagcaagaactcaacaatctatttgacgacctggagaacggcaaaatcaatatacaagaaggattgaaaattctagaaaactagtttcggaaaaggggaaaattaatgaagaatacagaagaaaacaagactgcaatcataatcggaggcggtattgcaggaatggccgcgggctgttacttgcaaatgaacggatacagcacgaaaatttttgaaatgggcttgctgccgggtggtttatgtaccggctggaagagaaaagggtacttttttgacggttgtatcagctggctggtcggttcaggacctaacaataccttccataaattttggaaagaactgaatgtaatacaaaatatggaattcattaatgatgaagaatttgcggttgttaactttagaaatggtgatacatttacgctgtatgctgatgtagataaattagaacaggagtttttaagagttgcacctgaagatgcggaaacaattaagcttttaactgatggcattcgagttgtttctgatgtagagctggatttggataaagcgcccgaactgttcgatttagcagactttgaggccttcaaagcaaaggctggcccttacatgaaagtaatggggcaatggggaaaagtgacgatcaaagaattcgcccagcgctttaaaagcagttttgtaagagaaaatgtaaatcgtctgttttggtttaatgtagatacccctatatcttactttatggctactttaggctgggctaatagcaaatcttcaggacatcctgtagaaggttctctgcaattcgcaaaaattattgaagccagatatgttgaattaggcggtgagattcaatataaatcacctgtttctaaggttttagtagaaaatgataaagcgatcggaatagagctgaaaaacggacagtgtcattatggagatatcgtcatttcagcagcggatggctataaaactatttttgaaatgctggatggaaaatatacagatgatgaactgacattttgttatgacaaccttaaaacaagtgcaccgcaaatttatgtcggattgggcgtatcaaaaacgtttgaaaaatatcctcattatttgagtctggaattagaacagcctcttaacgcctatggctgtgacaacgttaaaaacatatttgtgaaaatatataacgaaaatccttcattcgcgcctgatggcaaaacgagtattatcgtgtatgcgaaaacttctgctgaatactgggagactttgcaaaaaaacaaccgcgaaaaatatgaagaagagaaaaaagcaattgcgaatgtaatgattgatgaattagacaaatggtttggtgaaattaaatcaaatattgacgtgactgatgtatccaccccatatacgatcagaagatacacaaataatagaaatggaagctggcagggctgggaaaaacagatggaaggcatcatgcacgagaaaaaactgaaacgttcacttcccggacttaaagacttttatatggttgggcattggagtcaagtgggaggaggtcttccgagtgttgtcttacaggccagaaatctggtgcaggtgttatgtaaagaagatggaaaggtttttgagacaaaaattaactaattcaataagctgcttcaattgaagcagctattctatatatccatgatgcttctcatattttatatagaatcaaaatcgataggggtgattaatcgtggatgatatttcgattataaaacaatatgtattggagcaagtaaaagagcaaaaaatggacagggaaatggctttgcgcattttaaaaggattatctgataagtccaagaaaaatcaatttgatattgccattatcggcatatcctgccgtttctcaaaagccaataatgcaaaagaatactggcaaaacattatgaaccgtgcctcatgcatccgggacttaccggagaagcggcggaaagatattgatccattgctgcccagtgcgaatgagaattcttattttagagcgggattcttagatgaaattgataagtttgattcatcatttttcagaatttcgccaagagaagccatgcttatggatccgaaacaaagattgtttttggagacagtttatcacgctattgaggactccggttatgcggggaacaagttacaaggttcgaatacaggtattttcgttggacatgatcatagcggtgacttgaagttttcctatgcttccctagtaaaggatgcggatatgattgcaatgacaggtacttatcccggcatattggcaagcaggacctcctacatttttaatctgaaagggccaagcttggttgttgatacagcctgctcttccggactcgtttcggttcatcttgcttgtgaggcacttaaaaatgaagaatgcagcatggctattgcgggaggcgttaatttatttctgagacctgaaaatataggtacgatgagcgaaatagaagcggaaaacgctaaaatcagcatttttgataaaaatgcaaaggggaccgcatggggtgaggggatttctgctattgtattaaaacctttacatagggctatagaagacagagaccacatatatgctgtcattaaagggagcgctacgaataatgacggggcttctaacggaatcactgctcctaatgctgaatcacaagagaaattgatttcacgtgcctggaagaatgcgaatattagtccggaaactatttcttatattgaaacacatggaacaggcacgattttgggagaccccattgagatcaaagggataacgaatgcgtttaagaaatataccgataaaaagcagttttgcggtataggttcagtcaaacccaatatcggccatacagtcggggcatcaggcatggcgtctctcattaaagcatgcatggctttaaaagagaaggtcatccccccaagtatcaactttaatgaaccgaatcctttaattaatttttcgaattcacctgtttatgtgaatgacatgataagaaattgggaaaaaggagagacgccaagaagagccggtgtaagttcgtttggcttcagcggaaccaactgtcatattgtattggaagaagcacctgaaataataggtgagactgaacagagacaggtaaaagaggtattcactctgtctgcaaaaaataagtccgtcctgaatgatatagcatcaaagtatcttcattttatctcggaagaaaacaatttgaatctctctgatctttgttatacagcgaatacgggaagaaaacatctggagaatagagtgtgttttctcgtaaaagacatcgaagatctgaaggaaaaacttgaaagtctgctcgaagcgccggttcagcaagaagaagctgcattttcttataagaccgatagagatctaagtaccgctgctggaaaaaaacttaaggcttataatgcaggcgggagaacagatgagagtcttctgattgatataagcaagctctatgaaaaaggtgcagagatcgattgggaaatgttatatgaaggagaaaaaagaagaaaaatcagcttgccgggttacgcatttttgcgggagagacattgggtgaaactgcctgaaaaattaccgataagcaatgcaccagataacccttcagtcaacaagcctcaaataataagactgagtggcagggaagacggctgttattcagaaacagagctaatggcaggacaaatttggggaaatgcccttggaatcaatccgatcgatgttacatccgatttttatgaaatgggcggagattcaatcatagcaatagaaatcatcaactttatcaataaacagcaaggaacggagctttcagtttcagacttgctaaagcattcgaatataaaactcttctcagcttatttggatgaatattctctgaggaagacaaatgatgtgaatgtgattcccaaagcaggcgatttagagtggtatgaggcctcatctgcacagaaaagaatttttattctagatcaattaaataaaaacagcacttcttataatatcccgttctttttaatgattgaaggagagttggacgataaacgtttagaagatgcgtttaaaaaattaataatcaggcatgaggttttaagaacgtccataggtttaagggacgggcagcttgtgcaaatcatagaaaaagacgtccgatttaaaatggatagaatcaagacctccgaagaagaattagagagccttatgtctaattttgtccgcccgtttgatgtagaaaaggctcctttactgcgtgcaggattagccgagattagtcatcaaaaacatcttttaatgatagatttacagcatattatagcggatggggcgtctatcccgatcttccaaagggaattgataaatttatacgaaggcaacgaactgccgtcattgaacattcaatttaaggattttgcgatatggcaaaatgaattatttcatactgaagaaatgaaaaaacaaaaagatttttggttaaatgagtttaaaggagaaattcccgttctcaatctgcccgcagatttttcaagagaagccgaacgagatgatcaaggtgaacgaatctatttttatgcaggaagagagctgactgccaagttaacagaattaaacgcaaaacaaaaagtcacccttttcatgactttaatggcttcatttaatgtgcttctccataaacttactggtcaagaagatattattatcggcacacctgtagccggaagaaagcataaagaattagaaaacatgataggaatgtttgtaaatacgctggcactgagaaataaaccatctgccgacaaaacattcaaagaactgcttgaagccgttagggataatgcgcttctagcttatgaaaatcaagattatccttttgaagagcttgtagaccatttgaaccttgagagggatataaaccagaatgctcttttcaacgttatgtttgtccttcagctgatggataatccggcaattgaagtaaatgggctgaaatataagccgtatctttatgaaaacaaaacagccaaatttgatcttctgcttcaagcatttccttcaaaagaggatatcaagtttgagttcacttattcatcaaacttgtttaagcgcacaactgtagaaaaattctcacagcgattcttaatgatcctcaatcatattgttgaaagtcaagatggactaatcggggagattaacattttagaagaaaatgaacgacgcgaaatattgagttacagtggaagatcactgagaagcagaggcacagatgcatctatctgtgagctttttgagaagcaggcggaagcaacgccgaatcaaatagctgtgtctgcacaagacggaagcttaacttatagtgagctgaacaaaaatgcaaaccggcttggaagagcactcattcaaaaaggtgtcaaaaagaatgaagcagtaggcatagctgcagaccgaaccactgattttatcatcggaataatgggaattttaaaagcaggagcagcttatctgccaattgatccatcatatccgcaagaaagagttgagtatatgctcaaagacagcggggcccgtttgttactgacggatcgcaacaatcatggtcaaaggtacggagtagaaagtgtttgtctgaatgaattggaaacagttccagacgacgggaggaatgttaaaggaggaacggaagggcatagccttgcctatatcatctacacttctggatcaacgggacacccaaaaggtgtgatgatcgaacataaaagtatagcgaatttaacagaagccctgcatgaacgtatctactgcaaacatggcgggcagcagaatgtagcgttgttggcacccttttcttttgacgcttctgtcaaacagattttttctgcactgcttttaggacactctctttacatcgtctctgaagaagccaggcatgatatcacgaaacttgctgaattctatatccaaaataaaataactatttctgatggaacaccagcctatctcagcctgctctctgagtctccgcagtgtggccgtataggtgtaaaacattttattataggcggcgaagtgcttaaacctgaagaagtaaagcgtttctataaagtatttaaaaagaatgaccgtccttatataacaaatgtatatggaccgacggaatgctgtgttgatgctgcagcttatacgataaaccaggataatatttccaatataaagagaatccctatcggcacaccgataaaaaactgttctatctacatactagataaacagcagaagcctgtgccgccgggagttatcggagagttatacatcggaggggaaggagttggacgaggctattgcaatcgtgaagaactaaccaaggctaaatttatcccggatcttgttcattctggtgagaaaatgtataaaaccggagatttaggcaagtggaatgaggatgggaatatagaatttgccggaagaatcgaccgacaagtaaaaatcagaggatttagaattgaactggatgagattataaacagactgctgtctcaccgcaatgttcaagaagcggttgcgattgctcacaatgatcagatatatgcctatacagtatgtaaagatacgcagccgccttctcagctaaaagaatacttattggaatatctgccggaatatatgatcccgacagtcattattggcatagataaaattccgttgacgaacaatgggaagactgatgtaaaacgtttgccgcttccagctgaaaataatgccgagctgcatcactttattgctccgagaaacgagattgaacgaatcgtcagtgaggtttggtccgacattcttgaagtttctaaaatcagtataaaagataactttttcgttttaggcggagattcaattaaagccatacaagcagcggtcagaatggaaaaattcaatcttaggctggaagtgaaagacatctttcattaccagacaatcgaaggagtttcgaataaagtcagttatataacagcggcatctgataacagtgtgataacgggagaagcccgtcttgtgccaattcaatgctggctggctgaaagccataatgatactctgcaccatcggaatctttcttttatgttatacagggaagccgggtttggcgaagatattgtaaaagacattttcacccggattattcagcatcatgacagtctgagaacagtattcaaacgtaaaggcgatagaatggtacaggtaatcagaggcctgacggacggcgacttgtttgactttcatctgatcaatgcaataaacatgccgcaatcagttttaaaaatgaaaataaatcaaatacaagccagtatggatctgactcacggcccgcttgttaaattggcactcattaaggaagcagatggggaacatctgttaatcgtcattcaccaaatgatcattgatcatatgtcttggagaatactgcttgaagattttaatacagcatatcagcaagttaaaagtaacgaagacattgtattaccaaataaaaccgattcgtatttaaaatggtctgattatctctataaatatgctgaaagtgaacggctgttgtttgagaaagagtattggacgaaaatcgaaaatgtttatgctccgtctattccggttgatattcaggggcaaattgccaaagtcaaagataacagacaagtgtacaggcagtttaatgttcgggaaactgaaaatataatgaatgcgattcaaggacaagatcatttcactattgagactgttttgctcacagctttaggtttgacagtaaaacatcaaacaggcagtaatacatctctcgtgcacttaggcaaccatggccgcactcatcagagtgagaagcttaatatctacagaacagtaggcagattttctgcaatctatccggtggctttggaggtctccgattctgatcatatcggttcgagtttagataatgttaactcgaccttagccaatattcctgatcaagggataggatatggtattttaagatatttaaaacaagatataaaagagaaatcaaaaccagacatttcatttaattatatgggcgaatttgataatgaactgcacacagaaagctttacggtatctccgctttcaaccgggaatgatataagtgaagatgaaatttggaattacaagtttaagtttattgtgttggtaagagagaaaaaattgagcattggaattgaatataatcaaaatcagtactataagagtactgtagaaaatctgctcaatcagtatatgcgttatatcaaaaaagcagcagaaaccatttaattaatcggaggttaacgtaaatgaccaattcagttcagcaagataaacaagtaccgaagaaatatcctcaggccgcagtcatgcaaatggtttcagggctggggttttccctggcagttaaaacagcggtagaattggatgtattttccgcctttcaaaatggaccagcttcagcggaagcgatagctgaagcccttgaattgaacccctctgccttattcaggctcttaagagcgctggaatccgtcggtttggtcgcccaagctcaaaatggctattatgatgtaacagagtatggtgccactttgatgcctgggaaagcaaaatccattgagcctttggtagaatatctgctgcatgaaacagtagtgcagtctatgtttaaaatggattatagtatcaaaaccggcaaatccgcttttgaagccatttatggtgataaatggtatgagaataatagtcttgatcaagattacttaaaaacaatggataaggcgatggagatttattcaaaaatgagtctgccatccatattgaaagcttactcatttgaaaagtttgatgttatcgtagacgtcgcgggaggaatgggccagttaataacaggcattttaggtgtggctcctaaatcaaaggggatattgtttgatcttccaaaaacgatacaaagtgcaaaaaagcatttagcatcttcagagatgagcgaacgctgtcagtttacggaagggagtatgtttgaggaaattccttccggcggagacttgtatgtgataagcaaagtgttaaacgattgggatgatgagcatgtggttgctattcttgaaaatatagccggtgccatgtctgatcattccaagctgattatagttgaaaatgtgcctgaagcagacaggctgtcccctgaagaagcttttcgtgatttattatttttagtatgctctgcaggcggcagagtcagaaagataaccgagtttgaacaattgattgaaaaagccggattaacactattaaatgtaattcagactccgagtaaatacacaattttggagtgtggaaagaaataatgttatataagctatctcctttaggagatagcttttttatataaaaagttcaccaatttgactgattgattctgtctatctattgatttctctgataaaatgaaacttataatatttaacataattataaatttgaaccacaaggaggaagaaacatgaaaaagagactcgttatgctatttgccgcggccgccgctgctttgttgcttgtgagcgggttgtgggttccgtcagcgtctgcggcgccggctcctgctttaacacaaatccgtattatcggtgtgacgtctgacggtcagaattaccaatgggaaaatatcggtccgaaccaaatcagcgcatcaaaaccgatgaaggggacaacgggttatttagccgtatatttccaagggtatccgaacaataatacgatccaggcgtttaacaacggaacgaatattacaaatcttacgtcaaaagcgctggaagatgaatatacgaaaaacggcaatatcgttacaggctatattaaatattacagcgttcctctttcttatgtcagttcaggaacgttctctttctccgcaacggggctgaacgggccgtacacgccgttaagcagcggatttttctccattcaggtacagagttaaaacagccgcccggtgctttcatgtatagtttttctctctttccgggaagctattcctaaagaaaagggagggcttacatgatggacaggacactcggatatttgcgcgagtcgctttcgaaccacttggagcatgatgtgtgccggggggtttataaaaagcttcaggtgaagcattatgcaaatgagggcgagttcgtgaaagatctaaatgatctggaaatggatgcgctgaatcaggtgcttgaaaaggaaatcaaatatgctgagaacgagcaggatgagaagcgcacgatggaattgaatgaagtatatgagcttctattttaaagagcctcccggcggccgggaggctttttattgtttcggaaccagtttacagaatcatccaaccctttgtataatggatagttgtgaaaaacacagacggaggagaaacatgaacgaaataaaaaaacagacggttcttgagttgtcatcggttgaaaaagctttggtttatctggtgccgccattattggggctggtcatcggatggtttctgccggtcattacgaagtgggccgtaacattggattggctgccttttcacgggccgctggaaataatcgcttcctttcacggatggaaggctgcggctgcaaccgccgttatcggcttaattgggggagtgtggctgacgcgggcagcttttaaagaaagtcttgtggcagtcgtgacggacagcggggtgtccttaaccatatataatgaagaaagcgtgttttcgaaagacagcatttccggtgtgtttacggatgggaagtatcttgttttattaggcactgaaggacaggagctttttcgggagaagcttgagccggcggttgaaaaagcggctgatgcgtttcgcgcgcatgggtatgtctggctggggacggaagatccttttaaagaagaatacaaacggtgggtgccggacacgccggatttggagcccggggcaaatgctcttttaaaagcgagagaaaaggcgctgaaagaggaggaaaaggctgatgcgaaagagctgaaagcggaaatatccaaactgggcattaccgtgcgggagaaaggatcgcgccaatattggcggatctataaaacgccgtctgcataaaaaaagctgccgccgtttgatacggccgggcagcccgggcacagattatttcttcttgtcatcataatattgaaccgggtacatggagccttcggataccattttgttatcttcaatatcttcgggatgcgggttgcctgctttgttgacggggaatgattcaatatcctgcttcccggagagcgatgttttcatattgcggataaagttcatcaccttttggcggtttgatttatctttgagcaggtaggaagtcactccgacagtcgacacggcaagtcctgaaatgagcagtttttgtttcacgataaaaactcctttctatttatggcttgcagtagttattcccgcttaacggctgtttaaacatcggaaggttaattttggcttgccgctttaatgcgataaagattgacaaaactattttcagaataatattataaatatatgatagcgctggagtcatattttaattgaaaggtgttaactttatgaatcaattacatcgcagaatgggaacgtttgcactcatgatggtcggacttgggtcgatgattggctccggttggttattcggggcgtggcgggcggctcagattgcgggacctgccgcaattatttcctggattatcggtatgatcgtaattttgtttatcgcactttcttacagtgaactgggttcaatgttcccggaagccgggggaatggtaaaatatactcaatattctcatggatcatttattggatttatcgcaggatgggcaaactggattgcgattgtttccgttattccggtggaggcggttgcgtctgttcaatatatgagctcatggccgtgggactgggcaaagtggacaagcaatctcgttcacaacggcacacttacgggagaggggctcggcttcgcatccgtattgctgattatttactttttactgaattattggacagttaacttgttttcaaaagcgaattcattgattaccatctttaaaattattattccggggctgacaatcggagcgctgctgtttaccggttttcacggcggaaacttcacatccggttcaagcattgcgccgaacggctgggcgagcgtgctgacggcggtggccacatcaggtatcgtatttgcgtttaacgggtttcaaagcccgattaacatggccggagaagcaaaaaatcccggcaaatcgattccgattgcggttgtcggttcgctgctggtcgcaaccgtcatttacgtcctattgcaaatcgcatttatcggtgcggttgaaccttccatgatcgttcacggctggagtcacctgaactttaactctccatttgccgatttggcgatcgcattgaatatcaactggcttgtcattattctttatgcggatgcgttcgtatctccgtcgggaacgggtatcacatataccgctacgacgtcacgcatgatttacggcatggaaaaaaataaatatatgccgagcattttcggaaagcttcatccgctgtacggcgtgccgcgccaagcgatgattttcaacctgatcgtatcgtttatctttctgtttttattcagaggatggggcgtgcttgctgaaatcatttccgtagcgacgctgatttcttatatcacgggtcccgtgacggtaatgacgctgcggaggacggcggcggatttgtacaggcctctccgtctgaaaggactcagcgtggttgcaccgctcggcttcgtgttcgcgtctctcgtgctgtattgggcgcgctggccgttaacagggcaggtgctgtttatcattttgatcggccttccgatttatttctactaccaagcgaaagcgaagtggaaaggattccgcagaaactttaaaggcggcgtttggatggttgtctatctgctcagcatgatggtcatttcatggctcggaagtgaaaaattcggcggtctgaacatcattccgtacggatgggatatggggctgatcgcaatcgttgcccttgccttctatgcgtgggcgctgaagagcggattcaagactgagtatttgaaagacgccaaagcaatcaacgatcaattaaaaggcgggcaggcggaagccgctgccggaaaagaataatgattgataaaaaccttgcggtaacgttcccgcaaggttttttgatcaggcaaaaaaacatgggttcggcatcatctccgaacccatgctggctttatgatttatattcttttttaaccttttgaaatatatccgcatagttggtgaacacaccggttacgccccaattcagcagacggcgcatgtccgtctcgctgttcacggtgtaagggtgaagcagtaggccgtggctgcgaatgtttcggacattttgagcgttcagcgctttgtaatccggtccgattccgacggcatatgttttgatgtctgttaaatctgcgtcagtcattgaggtcatctgttccgcttcaagcaattggacggcgggaagtttcggatcgagctgtttgattttcagaaggctctccctgctgaaagactgaatgataacttgtccaagtttcgcatgcttacctgccaatttgtattttttcagtgaggcgatcagtttttcttccatacccggatatgtttcgggcgcctttgtttcaatataatagtttgcatgtctgccgaaccgttttaacacgtcatcaagtgtgggaacgcgaagtccggcgtattgcggttttgctttttccggataggccttattgaaccaagaaccggcgtcgagcttttgaatctctgctaatgtatgatccttcacccagccttgtccgtttgtggtgcggtccagtttttcatcatgcatgacgatcagcttgccgtcttttgtcatttgtaaatccagctcaatatagtcagccttcattttttgcgcagtttcataagaaaggatcgtgtgctccgggacataccccgaagcaccgcgatgggcaatggttaaaattctgtcaggagacaagaggtttccttttcccgccgccgatacaggcgtgacgatgaatgacaataaaccgaatgaaagcaataccaaagcaaacaacttatgtttccgcatgttttcttcccccttaaaaatcaatatctgtctctagtgtagaaaatcgttgtaaatgctgtactgcaaaaatattaatcttttatgttgttttcttacacatgctccgcccgcttgcctgtattccacgtcatagccaagaagacgatggacagcacgcatgaggagataagcatgataaagccgccgttccagtcaaagcggtctacgacataacccatgatggcgttggcgaaagcagagcctccgatgtagccgaaaaacccggttaagccggctgccgttcccgccgcttttttaggcgcaaggtcaatggcctgaagtccgatcagcatgacaggcccatagattaagaatccgatgctgatcagcgcgatattatcgatgagcggatgaccggcagggttaagccagtagaccaatacagcgataaatacgccggccatgaacagcacgccggccggtgcgcggcggcttttgaaaaatcggtcgctgatccagccgcacaaaatcgttcccggaattcccgcatattcataaaggaaataagaccatctggaatcttcaggagagaaccctttcgcttccgtcaaataagtcggcgcccagtcaacgacaccgtaccgcacgaaataaacaaagacattggcaaatgcgatataccacagaaatttattattcagcacgtatttgaaaagaatttctttggtcgtcatctctttttcctggtctttgaacgcatgtttcggatagtcattccggtattcttcaatcggcggaagcccgcaggattgcggcgtgtcccgaacgagaagaacaatcacaaatgaaatgacgatggcgataatcgccggaaagaaaaatacgcttttccaagtaacaaacatggcgatgccgagagtcacgagcggggcgagaatacctccgcctatgttatgggcgacattccatatcgacattttcgttccgcgttcactgatggaaaaccaatgagccatcgtccgtccgcaaggcggccagcccatcccttgaaaccatccgttaataaacataaaaataaacataatcgtcacgcttgacgtgacccatggcatggaaacaaataaaatgttgacgacacctgacaaaaacagacctgtcgcaaggaaatacctcgggttgcagcggtcagacaccatccccataataaatttgctgaagccgtaagcgattgatacggccgcaagcaccaagccaagttccccttttgaaaacccttgttcctgaaaataaggaatagcgaaggcaaagtttttgcgaagtaaataatacccggcatacccgatgaaaatccccaaaaatacctgcagcctgagccgtttataggccgcatccgtctttgaatcatccaatctctcaatatgcggagccggcttgaacaattgaaacatcatatcctcccctttgctgaacgtctatcatgatgtatgtatgactcctttccttgaaaatgacaaaaagaaccagaaatcacccttatgaaagggcgcggtttcctggttctcctcatctccatccaaaaatcattaacttgtatatgatagcgctttcttaaattatcacagtctggcgtgaatgtaaacgctttaaggaaagttttcatttttttgaataaataaccggagggaatatcagccggagcgcgaaagatttgatgtactcgattttgtactcaggcataagatgtgttaggccgaactaagaaaagcgaagggagtgcatctgttgattgatgaattggattttgcgttcggtgttctgccgctttgtatcatcatcctgtcagtcgccggaacgtacctgtttaaaaacgcgttcattatgccggctgccgctttagccgtttgccttatatgcacctttaccatattgaatttctcgtttatcgggtgggccgtcgtgtacacgctcgtctctttcgcgttatcgcatattacgatggtggtgatcagccaaaacaaaaaataggatcggcggcagccgatccagctatcaaaagcagagatgcgttctctgctttgttttatttatgaatgtgcaggaattccttgatgaccgcggtctgttcttctttcggatagcttctgtacagatggctggctaagcggacggggtcaccgaagaagtaccgctcatattgtgtctgtcttgttccaaaggggctcatggtcaaatcccatgcgaggcggaacacttttacccggtcctcagcgttcaattcggccgcctgtaaatattggtcaaggtctcctctgatgtcggaacggaacgctttttcagtcggcaaagtcaccattccgcttgccccgatcagctggatgatttccgtgaagcgcgggtagatgtcagggaaaatcgcgctgaccacgcgaagcggagtgacactcggacgcatataaccccattcgtctgtttccgcatcattctccgacttttccaaaagggctttcatcgtttccagaccggtgatgatctcagccatcttggcctgaatatgctgatattcccccacatctatcgcatcgacaagcgtttgggcgaggcccaggagaaactccgtctttacaatttgtctcgtgataacttgatgaaatgcgaaggcgttaaaagagcttttcatattaaaatcaaaagccgcctcgtaattattataaaaaaatacgcgttcccaagggaccaaaacgtgatcaaatacaacgatagaatccatttcttcatatcttgagctgagcggataatcaaacgatgattttccgagtacgaaagattccctgcagatgaattttactccttttgtattggaagggattgaaaaagcgaacgcttcatccgattcaaaatacatcttaggcagagaaaccacgagcacttcatccgtcaggccgccttgtgtggctaaaatccgcgcgccgtgtatgataaggcctttttcatttttatcgacgacttttgccgagataggtgtcggcgatacgtttacacccatttgtgaacgattcacctgaggggtgataaacgtgtgcgtaaaagaaagatcctgtgcggcagcgcgttcgtacagcgcttgaacatgttccggaaaacattgatcacggtctttcaaaagcgcggcagaggaggcgaagctcatcagcacggtattcatataatccgggcttcgtcccatcattccgtgcgtgtgtctggcccaatgttcgaacatgtttcttcttctttttacgtcttctttcgttttcggctgcaggtatgaaagcccggcccgttcttttttaccgggaagactgtaagtcatttgatctttcatgtccggtttcgtttgcaaatcataaagagagcgcttcgtttccagaaggcccttaaatgcgggatgttcagaaatctgtccctcgatcttttcaccatcaagccaaatctcatttcctagctgatttaatcggtcaatgaacattttgccattaatgatacccatcatgtcgcccttctttctttgcagatccactacctcattatattgaaaacgaaattgggtgttccggttatttccaaaggggaagagccttttttgataaggggggtgaagggattgcatcataaaaaaaccccttaagcagaggggtttttaactgatcatgtctttgtatcgttgttcgaggacaaagtctatcattccggtgatacgggtgttttcagatttttgtctgaaacggtcagacacttggattttccttgaaaacggaaatacagcaaaaatccaaacaaggccggccaggccaaaaaccatctgcagagccatttcaatcaaatcattaaaatgagtgctgaaaaaaaagatatataacgtgatgaatgtgactgtacatacgattttgacagtatgttggaaggtgaggagcggttcagtgaaacacattttcatttgattcagtgtgagcgaatcttgtttcattaaatatgtaagcagttctttgtcattttgacttcgcggaatcaaatcattttctattttttgaacggtgtccttgtatgtctgcatatcaatcttcatacgaatcctccttaaaaaataactccaagaatactcattgagcattcctggagcaaggagctgcctgttcaattatagaaatagtgataaaactgtgctgaacaaggctgcagctcctcctaattcaggtgctaaaacgactaaagcaccgatccctacaataacaataattcctgcgcctgcaatagccatggtattcacgacagaatcccaatccggagagtacacctcttcggaatccggcaatctgaagctcttttgttttattttaaatgtaatggtagttgttagtccagtagtagcactgtcaccgaccggaatatcaggtgtataaattttaaattgaatattcagcgatcccgcagccggattgacatacacttctaaataaccgttgcgcactgacaagctcagactgttaagcaggttttgatacgaatcaatttgtgatgctgtaaaagagacttgtgaatctcccatcagaccggtaatataagctcccggtttgccatttgtaatggtaactgtgttgggagaaccttcgcttggcactgttgccaaaagtgaagtagataaaagaatatccatttcaggtgatgcataaatggtttctgtcttgtcgaattcaaacatggcattcgcaagattcgatatattttctaaagcaggaatggttgttaaaatgtccgtcagtgtgcgcagtcttgcatcatacacgggatcagaaggcggatggacgctgcttgcacccgagtcttttccggagtatccgtctttgtcaatggcgacttttcccgctccgcttccgatcgtgccttcataaaattgatcaaaagcccagtttttcggcatcgggtatccgaggttgccgctgaatccggtcgacatgttagccgtaaagctatatttggtcagacctgcttctgacgtccggatacaaatgtttctcggcccgtataccccgatttcatatttcggcgcagttgagaacgcctgcattttcataaaagctgacttgatttcttggaagtaagggatgattttatccgtgacttcataatcatacgcatcaaaatcgacggcaaagtaaatggtcgttcctgacggaaaacctaatcttcgggcggctgatgcagcgctgtacgcatctctcgttccttggtcttttacaaaataagaagattcatagccgccgtcctgataaatcggaaacacgcttaagccggcattgaaaatcgcggaaagttcttttgacgttaacgctttcgatgtcagtccgctgctagtccgcacattcccggtcagatatcttcccacgatcttatagccattctcacgcaaagttttagccgtatctgccgtcaaaatggcagcggtgtcacaagctgaagcagcccgcgttgtgtcgcctgagcttgataataaagctttaatcgtcggcatgtccgcataacctgtctgcggcaggcacataaattcttggaaagctttcactgccgatacaactccgacgccgtattttccgtcgaattcaccggggtcaaatgatttcccattacagtaaagcgcgtattgaacaatcaaaacaaagcctgtccgtgaatcgccgggagtcaaggtaggacataagctggtcgttccgttcccgaaaaatccattggcgacgcttgtgctcatgccttcttctttttgcagagcatagatgagggccttgtttgtatcgcgggcatataagccgtcacaaggcatcaagccgatgtagtcattgtaatcccggttcaggttctgctggatttggcggattcttttgtcgcctcccgctactaaccgaaaagcgctcatatccagcaaagccttcataatgagtgccgtgacaatgccgtcttgcttagtaagtccggccgctttttgaaactcttttacagcgctttcggtattttcatagaaaacgccagaaaatccgcccgggttaaaccctttacaccacagcgccccctgcagaatgtaattcatgtttgtcggcttagaatcgggagcctgctttttcaacggtttaaacaatctttgtgtcgtcggtccgaagttatcggctggttctgaaataccaagctcaatttgaagcgcccgtgtcagaccgtaaatggtatcccagcctgtttttccgttttccggcaccttgttgtacccgtgtctgcctttgtacgtctcattcagccattgttgtgtttccaggaccatttcgtccattgcaatccctccattacgtgtagtgtgcgttcattcataggtggcaaacgtatgacagtttgtcatgggtgcaggagtttgtccgaggacagccccatcatacaaacgccgatagagaggcattgataggaaaagatctctctatgacaattgatacaaaaacagcaaaatggatagcgctttaaagtaactttatcacttaatcaaaaataacaagaatcataagtagtagtcatatagtcattttcagggctgttttcatctctccctgcagtcaaaatggttagttggacggatttatgattagctatattgtcattaacataaatagggtaaatagttacaggaaggaaggattttctcgatgaaaagcaaaaagatttttaagtcgctcatcattatttttactcttttaatcagcggaattggttttatgggtttttcttctccgcaaaaagcagaggctaaagactggcttcatacttataaaagcgggtatttcactaactatgtgatcaatacatatcatcctaaattcactaagacgacaaaaaagtacagcttgagagccgtgacttttaaatccaacagtaaagggaagggcacgtataaaatatacgttcaaaagcaagtcaacggcaaaggtgcctggaaaacaatcaaaaccgccaatgcaaagaaaaatggaacgacttattttgaaacacctttgttaaaaaaaggagattcatacagatttaaaatggtcaatcaaggttcgaaaaaacgtgtcaattatagtgcgagttggattgtattcgcttcataattttgattttcagcttataatgttttagctgccgcagctgcggcagctttttattttctccggagctcaaccgccagggagaccgcatctgtctcttcgggcgtacgtttgtattcaccgcatcattctggattatgcggaaaggtacatcgtttcaatgaaaagccgatcccgggtccttttgatttgtttgaaaatgttctgatataaaaaaggcgtgccgcggtgtaaaatggctatattgataaaaatggaggttgagatggatcaagattatatgactgagcttgtctcagtccagctgaagaaaatccggtcggagagaggctacacacaggagaaaatggcggatgtgatcggcctttctaaaaagtcgctggtgcagattgagaaagggcgggcgcttgcggaatggccgcacgttgtggcggtttgcgcgcttttcagatcaagtgaaacactgcaatccgtattaggagatgatccgctggaggtcattgaaacggttgctcaccgcacaattgacaggccgaaggggaagacgatgggcggcaaggtgtggtggaaagccatcgagaaaaaaggcgagttccgcttgcagcagcatttgatttcccatcattaccgcatccttgattcttatgatgatctgtggttcagcagttttgaaaaggcagaagctttggagcggcttgatgagctgtttttggaggcggaggaagcgaagcgctgacgcacctccggttgatgtattttctgacaagtgagaaaatatgtataaattccagccaaaggagagattcgaatgaagcctgaagatatcgtccgaagcggcccgaatcagtacatatgcaaggaaggaatcgcaaaagaacttccggggctgctggagacattcagaaaacccgttattgtgaccggaatcaaatcctatcaggcgttctccgattacggcggcggttcttcctgggatgtgattcagcacaaaggatactgttcacctgaggcggtgcgtaaggtctgcgggcaggcggaagacgcggatgtgatcatcggtatcggaggcggcacgattttggatttggcaaaagcggcggcagaccggcttgatattgaggctgtgatgcttccttccattgcggggacgtgtgcggcaagtacgccgttgagtgtcatatatgatgagagcggcaattttatcagagttgattatcacaagcgttcaagctatttgacgcttgttgatccgctgtttttgctttcctctcccattgaatatatgaaaagcgggatcggtgatacgctggcgaaatggtatgaggccgaggcggtcatcagaaatacggaggaagcgccgcctctgatggcgcaggcggggctgagacaggcggaatatatgcgtaatctgttattgcgttacagtgaagccgccgtcgtaagcatggagaaaggcgagctgtccgtgccgttcatccatacggcggaaacgatcattatgcttgcgagaacggtcggcgggtatggcggccgtttgtgcaggatggcaggggcgcatgcggtccacaacggcctcagttttcttcaggagacacatcaggtgctgcacggccagaaggttgcttacggcatattggtgcagctcgcgcttgagaatcggagacatgagattgaagagctgcttccgttttaccgccggctcggtttccccgtcagtctctgtgctctcggcatccttgacaaccatgaggaagcaaagcgccgcatcgcttctcacgcctgccgggcggaagaatcgttatgcttaatggggcaatattgcgggaaggacgtgtcagcggcgattgaatcgctcgaatcagcacaaaagacaggatagagcttgtaatctgtcttgtctttattttttgaatatttccgttataatgagtggggtatagaaagggaggggccaaaggacatgtatcaggcgaagaagatgttgttattaggatcaggcgagctggggaaagaagtcgtcattgaagcgcagcggctcggggttgtcactgtagccgttgacagctatgagcatgctcccgccatgcaggccgcacacaaaagctatgtgattgatatgcttgataaagcgcaggtcagagaagtcattgagaaagaaaaaccggacttaatcgtgccggaagtggaagccattgcgacggatgagctgctgaagctcgaggaagaagggtttcacgtcattccgaatgcgcgtgcggcaaagctgacgatggaccgtgaaggcatcagacggcttgcagcagagacgcttcatcttccgactgccggctatgaattcgcgaatacatacgaagaatttaaagaagcggcggaaacaatcggctttccgtgcgtggtaaagccgctgatgagctcttccggaaaagggcaaagcgtgtgccgctcggcttccgggctgaaaagctgctgggacatggcaatggaaggcggccgggtgaaaaacggccgggtcatcgttgaggaattcattccgtttgaatcagaaatcactcttctgacagtgcgcgcggcgaacggtacgtccttttgcgcgccgatcggacatgaacaaaaagacggtgactatattgaatcatggcagcctcatcatatgacggaacagcagattgaagaggcgaaacacattgcgaaaagcataacggatgagctcggcggatacggtttgttcggggtggagcttttccttactgaagataaagtatatttcagcgaggtgtctccccgtccgcatgatacggggctcgtaacgcttgtgacgcaaaatttgtcagagtttgcgctgcatgtccgcgcggtcttgggattcccgattccggaaatcattcagctgtcgccgggggcaagccgtccgctgaaggcgcccaaagagcttgctgattatgcggttgaaggtttggagaaagctttggcggtaaaaagcactcaggtccgcgtattcggtaaacccgtcacgaaagtcggacgccgtatggcggttgcgctttctgcagccgagaccgttgaagaggccagagaaagagcggccgaagcactcagtcatttatcaattacataaaatgatcttaaaaggcgtttttaccgtaatggtaaggcgccttttttgtttggacagactatatactggaaaacggggttgtgagataatgtatgaggccgttttgtgccggttttttaattcttgaaactttttatgtccgcaatcgttatatgtaatgttctcatttcacggagaaggaaataacaatacatcatacggcttttcattcatcaagaacggacaatccggatcgcagcatggaatatttaagcagggtaatccggaatagaggaaaccatgattgcttaccttaatatgaacggcgaaaaaacaaaaatcaccagattagattgttcaaataacaccaaatgctgtataataaaagaatttgaatgatagcattgaaaggatttcattttatgtttccgtaaaatggagtctttatgcatacgcagtccgatttgatatggttttaattggaggtttgtgtaaactgtgaattatatacctagtatgattacaattggaaattttatttgcgggctcttatcgattcattcccttttgtatcataatatacactctgcggtgatctttattttcaccgggatgtttcttgatttctttgacggtttggccgcccgtaagctgaacgcggtatcggagatgggaagggagcttgactcttttgctgatctcgtgacgttcggcgtagcgccgtccatgctcgcttacagtgtttcactatatacgcttccgttcatcggaattttaatcgcgctttcctacagcatctgcgggatgatccgtctttccagatttaatattgaacaaagcaagctgccgacgtttatcgggatgccgattccgtttgcgggtatgtgtcttgtcattttgagctttatcaataacgcttttcttctgggggcgggaacgatcgcgctcggttatttaatggtcagcaacattaaatttccgcactttaaaaaacaggcgcctgaaaacctggagagcagaagatggaattagttcagcaattaatatccgattacggatatatcgcgatttttcttatgctgacactcggtattatcggattgcctattccggatgaagtcatgatgacgcttgtgggctacttcgctcatttaaacgtgctgaattacgggctctccattctgatcagctttatcggagcgctccttgggatgattatcagctacttcatcggcagaaaagccggccggccgtttattaataagttcgggaaatgggtcggcctgaaggaaaagaggatggagaaagtagacaggtggatgaagaagtacgggccgtacaccattattttaggttatttcatccccggcatcagacacgtgacctgctacttttccggaatcggcagaatggaattcaaaacctacttatgcttcgccgccatcggagcgtttttatggtgttttatttttattactataggaaaattcataggagtaatcaatgtttaatactgccgctaaagttctttaccgttcattgattgaactgactaataatcgattgacgtcttatctcattaaaaacttctgtgaatcgaaactgagcaagccgatgattccgctgttttccaaacactatcgcattaactggaatgaaacggaacgcacggcttctgactttgattcactggcgtcatttttcattcgtgatattaatttgaatctccgccccgtggcaaaagagaagaacgccatcgtcagcccggtggacggcgtcgttcagacggtgggcatgattaatcccaatcaaactttcatggtaaaagggaaggattattcgttcgccgaactgacggggtttaaaagcgccgatcacaagtataacggcgggtgttttgccgtgctttacctgagcccgagacattaccaccgcttccattctcccgtcagctgcacgtataaaaagctggccgagctggggaaacgctcctatcccgttaatacgatggggttaaagtacgggaaagatgtgctctcaaaaaattaccgttatgtgtacgagctgacccgtgctgatcagcagatgctcatgattccggtaggtgcgatgaatattaactcgatcgttcagacaaacaccggaaaccggcttgagacgggggaagagcttggctatttttcatttggatcgaccgttattttagtattcgagaaagatatgtttaccccttcggataacctgactgaaggccgtgaattacaggtcggtcagatcatcggttatgcggagtcacaggaggaggcgtccgctttataaaagctgctcctcttttttatatggtgtaaggaagtgaactttatggaagaaaaggatttgggaaagctgatcgaacagtatcggcatacaggcgatcagcaaattcttgaagcggtgcgggatgcatgccggcctgtcgttgaggcgctcatctcagaactggctgaagacagcgcggatcttctgcgggcaaaaggccgtgaccgttttccgtttattatcggcaagtatcagaccgcggccggcctttcgcttgagacctttttgcgcaatacgtatcggttttattttcagcaggttttaaaaggcgaagcgtgactggaagaaagagtacggacggaaatgttcatctttcgcccgttttcctgtatgatatagtatagtgtgcgtgatcattaatataattgaacagggtgtataaatcatggaaaaacaatatagagttttactttattataaatatgtaaagattgatgagcctgaagagttcacggctcagcatttgaagttttgtaaggagctcggtctgttaggccgtattttgatttctgaggaaggcattaacggcacggtgtccggaacggttgaacagacggaacaatacatgaatgcgctgaaagctgatccgcgttttgccgacatgccgattaaaattgacgaggctgacggccatgcattccgcaaaatgtttgtgcgccataaaaaagagctggtgacgcttcgtctcgaagatgatgttgatccgaatgtcacgacgggcaagcatttgaaaccgaaagacttttatgagcaaatgcaggatcctgacacgatcgtgatcgacgccagaaacgactatgagtatgacctcggtcatttccgcggagcggtcagacctgatattgaggcgttccgtgagctgccggactggattgaagaacacaaagacatgcttgaaggcaaaaaaatcctcacgtactgcacaggcggcgtacgctgtgagaaattttccggctggctgctgaagcagggatttgaagacgtgtcccagcttgacggcggtatcgtcacttacggtaaagatcctgaagtgcaagggcagctgtgggacggacagtgctatgtgtttgacgaaagaatcagcgtaccggtcaaccgcgtagagcacgttatcatcggaaaagattatttcacgggcgagccgtgcgagcgttatgtgaactgcgcaaatccggcatgtaataaaaaaatgatctgcacacctgagaatgaatacaaatacatgcgcagctgcagtcacgaatgccgtacgaacgaacgaaacatgtatgtgaaagagcacgaaatgactcaggaagaaatcaatgaacgccttgctttgattgaaaaagaggatcatgcggcgattgattaatagaaaagaccaccaatgaggtggtcttttttgtgtttacatactttctgtccgggcggtctgatctgccgtgacgggtcctttatatgtgaaggctttttcccatttggatacgacgatgcaggcgaccgcatggccgggcacgttgacaccggttcgcgccatgtccatgacgcggtcgacaccggcaatgatggcgacgccttccgcggggagaccgacggcattcgctgtcgccagaagcacgacgagtgagcctgacgggacggcggcaatgcctttgcttgtcatgacgagcacaagcatcatcagaagctgctgagaaagcggcatctccacatgaaacgcctgcgccaggaaaatacaggacaccgataaatagaggcttgaaccgtcacagttaagcgataaacctgacggaaccacaaaggagacgacccgcttcggacagccgtatttctccatccgatccatcagctgaggcagaatggtttctgtgcttgtcgtggagaaagcgatcaaaaacagatcccaaatcattttcagcacttcaaagtacttgattttaaagataagccccacgatcggaaacagaacgaagaggatcaggaacagcccgagaaacacagtgccgatcagcttcagcatcgggagcagaagcgcgattccgaattgcccgacggaggcggccatcagggcgagaacgccgatcggagcggtgaccatcaccatctgcgtcagcttgaacataatatttgccgtggattcgaagaaactcatgacaggtgcggaggctttgccgatgccggctgcggcaacaccgaataaaatcgcgaaaaaaatgacggcgagaagatcatttttcgccataacgtcaatgatgttaacggggataatatcaagaagcatttgtttcagatcgactactttttccgtatagccggaaagctcgtgaatgtcttttttagcaagatgagagaggttaagtccgactcccggcttcagcacgttcgccaataacagaccgagcgccagaacgagcgtcgtaatcacttcaaaccaaataatcgttttgatgccgagactgcccatttttttcatactgccgctgccggcggctccgataacaatggtcgaaaacacgatcggcacgacaatcattttaatcaggcggataaatccgtctcctacaggccgcagcgccatcccgaaatccgggaagaaatggccgatcaatgctccgatggctaaagcgatcaaaatctggaatgcgataaattttttcaagcgaatcccccttttacttgcgcatttcttacgtaattcgtgaagcaggcggcaaccaccttcctgtccgccataaatttgtcacatgattgactgtgcgaaaggaaggattgctttacattatgtaagcgcaatcattgaatatgacagaaagtcctcattgaaaaaaatgaaggagcataagaataaagaaagatttccgctgaaaatattaaaaattttgataattatcctcttataagtggtatatttgatatgatatggtcaactgcattctcatatatctgtgcatacaagattcgggacagaaaaaacatgcagcccagaaaagactgaaaatttgaacaattagaagaaaggtgtgcttttgttgaatcaactgattgaaagacgtaaggtcacagctagaaaggaaaaaccggattccgcttcattgggatttggcaagtacttcacagattacatgtttgtcatggattacgaagaggggagagggtggcatgatccgagaatcacaccttatgaaccggtccatctggatccttccgcatcggttttccattacgggcaggccgtatttgaagggctgaaggcttacaggtcagaagacggacgggtgttgatgttccgtcctgaccaaaatataaaacggctgaataaatcgttacggcggatgagcatgccacctcttgacgagaagctggcgctggaagcattgatacaattggtggagctggagcaggaatggataccgatagaaaaaggaacctctttatatatccgtccgtttgtgattgcgactgagccttctttaggcgtccggccttcaaagcgttacaagttcatggttgttttgacgccggtcggttcgtattacggcgatcagctgaaaccgatccgtatttatgtggaggatgagtatgtgcgcgccgtcaccggcggagtgggcgacgtcaaaacgtccggaaattatgcggccagcttacaggctcagcggaaagccgaagaactggggtatgatcaggtgctttggctcgacggagtggaaaagaaatatgccgaagaggtaggcagtatgaatatctttttcatcataaacggagaggccgtaacgccggcgttaaacggaagcattctcgggggcatcacacgcgcatctgtgatagagctgttaaaaagctggggcatccgtgtcagggaagaacaggtcgccattgatgacatctatgaggctgcaatgagaggcgaggtgtcggaggtattcggtacgggaaccgcggccgtcatctcgccggtcggcgcgctgcacattcacggagaaacgattgagctgaataacggtttgatcggtgaagtgtcagaaaagctctatgaaacgattgccggcatccaagtcgggaaggtgcgggattcgttcagatgggtcgttgaagtataaatgaaaaaagaacccttgcgccgcagggttctttttttggttattgggattttacggcttgcacgcgggctctgcttttccggtttttcaagtaataagcggtgtagcaaacggccataaatacaattccgcaataaagggcgatggcctggttcggatcaaaagcgatgccgatacaggaggcgaggcataggagaaaggccgctatcggtacggccggatatcccggcgtcctgtatttcaagtctgaaagctggtgcccttctttaagaaatcgtcttctgaacaaaaattgtgatgcggcgatgctcatccacacagccactaccgcaaatcctgagacggagacgagaacaagatagactgtatccgctgcaaatacgcttgacaacaacgacagaatgccgccgatcatactgaagatcagagcgttaaaaggaatgcctttagaggtcagcctggcaaaggcgggatgaagctccccttctttagacagggaccacagcatacgtgatgacgcgtacagccctgaattggccgcggacagaagcgccgttaaaatgacgaaattcatcagatcggccgcataaggcacgccgactctgtcaaataccgtgacaaacgggctttcaatcacaccggcttccttgatggagatcatccctgacagcacaaaaatcgttccgataaagaaaagcgccagccgccagactgtggtcttaatggcgcgcggaacggttttttccggatcggcgctttccccggcggcgattccgatcaattccgtccctgaaaaagcgaagtttactgaaagcatcgtcatcagtatcgggaaaaagccatttggaaaaaggctgccgccatccgtaaagttcgacagcataggtgcggcctcaccgcttttcatcgggacgaggccgaacatcgccgctccgcccaataaaataaacagtaagatggctaagactttaatgcttgagaaccaaaactccgattcagcaaaaaatttcacggagaaggcgtttaataaaaagatgaaaagagcgaataccgcactccacatccaaactgaagtatgcgggaaccagcgctgcatgaagagcccggccgccgtgaattcagagcccagcgccaccgcccacgtcagccagtacagccatgcgaccgtaaagcccgtcgcgggcccgatataggtcttcgcataggtgtggaatgcgcccgtcaccggcatggccactgacagttcaccgaggcaaagcatgacaagatagacgatgcccgcgcccaaaaggtaagcgaaaatggtgcccgccggacccgcctgatgaatggtatacccagagcttaaaaacagccccgttccgatcacacctccgagtgatagcataaagaggtgtctgcttttcatacttctctgaaaattcgtctcgttcttgttgttcattgttttccaactttctgcgagggccgttctaataaaaaatctcatgccggcgaacggcacgagattccggcgaaccggctttttgaatagaatatacaaactattccgattagtcaagttgtttttaaggtcttggcccaatcggcaatggcttggatgtccgcgggtttcgtccggcagcagcctccgatcaggctcacgccgttttcgtaccagctttgcgcgctttttccgaaatggttttcgcacgctgcgcctttccaggtttttgtcaccgggtcatattgttcgccggagttcggataggcgataatcggtttggatgctgcccgtttgatttcttctatcagcggcggaatatattcgatcggtgtgcagttgatgccgatcgctgcgatttggctgcaggagtcaagcagggccgcgcattcggaaataggcgtgccttcgctgatatgccgcccgtctttggcgctgaagctgatccatgcataagtgccggggaattcctccagcagccttgtgatcgcttttgcttctgacagggacggaatggtctcacaggccaaaagatcggcgccggattctatgagggctttcatccgggggcggtgaaagctgatcagctcatcttccgtcagtccgtaatgcccgcgatattcagagccgtcagcgaggctcgcgccgtaaggtccgatagaagcggcgaccaaaggtttaggccggtgtaaacggttttcttcatgcgcccaaaattcatcgcgtgcttgtgcggcaagttcaacagatgtctgaatgagacgtatcgcatcggtttccgggatgccgcgcgctgcaaatccttcaattgtcgattgataactggcggtgatcgcgcaatcagcgccggcggcaaaatattctgcatgcacctgtttgatcagttcgggtctctccaaaagaattttggccgaccacagatcgtcatgtaaatcacagcccatccgctcaagctcggttgccatcgcgccgtctatgatcataaccgggtattcatttaatatttgtgtaatgggattcataggccttcctttctgactttactgaaaatatataaaaagggtaatggacgctattctctttgtcaatgaaccggcggaaaaaaggtgttcaggacgctgcctgaacaccttttgtttaggaaatatgtttgcctttcgcgcttttcgcgatatctgaatactcccagcattcgatcccgtcgtcatcagggagcacatctctgtaaaagacggggtcctttccggctttcttttgccgggcataatcgctcaaagcggcaaatgcttttttcgacagaaggaaaattgcgattaagttcacgaccaccattaagcccatgaacaagtcagccatatcccacacaagctggactttggaaatacagccgaacagtaccattccgagcacgcagatgcggtaaatgaacagccactttttgttctggcttaaaaatccgatattggtttctccgtaataatagttgcccatcagagcgctgaagccgaacaaaagcattaagacggcaaggaaacctgacgcccacgcgccgacatggtcgctcaaggcggcctgagaaagcgcgatgccgctcagtcccggctggtgataagcgtctgaaaataaaatgataagcgccgtgcttgtacaaatgacgagcgtatccgtcaggacgccgaatgcctgaatgagcccctgtttcaccgggtggctcgtcgtagctgtcgccgccgcgttcggagcgcttcccatacccgcttcatttgagaaaatcccgcgtcttacaccttgcatcaaggccgcacctaaagcgccgcccgctgcctgatcaatgccgaacgcattttttacgattagcgacagaacgccgggcaattgggtgatattcgtcagaatgacaaagaaagcgacaccgatatataaaacggccaagacgactacgatgtattccgccattttcgcaattcgtttgacgccgccgaagattacgccgccaaaaaccaagattaaaataatgcccaatgtaagccggctggtgccgaacgcgttttgaaaggcgacgctgatcgtattggattgaacggaattaaaaacaaccccgaatgacagtgtgattaatacggcgaacagcgcgcccatccagcgtttcttcaggcctttttccatgtaataggccgggccgccgcggaatccgttttgatcttttactttataaatttgggccagcgtgctttcaacaaagcttgaagccgaaccgatgactgcgataatccacatccagaaaatagcgcccggaccgccgagtgcgatcgcaatggcgattccggtaatattccctgttccgacacgcgccgccatactgatgcaaaatgcctgaaacggggaaatgctgttttttgtccgggcggccgcgccttccttcaaaacccggatcatttccttcagcatgcggacttgcagaccctttgatctgaacgtaaaaaacagtcccagagaaagaagcagtacgattaacagttttgaccataaaaaatcatttgccgagccgattacattttcaaggaattcctgcatccaatcacctcttggttcgtttgattaaaaaatactgagctcccactcctgtgcgatatgtttcagcagcatgccgccggtcaggctgttgccgtattcatcaatggccggaccgtaaatgccgatgccgcatccgttatgaaaaggctgctctcttctggcgcttgggggaaccaatgccatgatgccgccggataccccgcttttggccgggacgccgacgaaagccgcatatttgcctgacgcattgtacatcccgcacgtcagcatcagggctttggcgagtttcgcgacatctttcggaatgacctgttcccgtcggatcggatggtagccgtcatgggcaagtatcaatccgattaaagcgatgtcctcggttgtaccctccatggcgcactgctttaaatacacttcaagcgtttcttccacatccgcctcgagaaagttcgtttcttttaaatagtaggcgagcgctctgttccgatgcgcggtctgccattcagaacggaagacctcctcgtgaatgtgaggccgttttcctattaatttttcaaaaacggaaaagagatattctaatttattatgcgccgtttcacccggaagcagcgaggcgacggtaatggcgccggcattgatcatcggattgaagggcttcccgggtttatggatttcaagccggatgatagaattaaacgcatcacccgtcggctccacgtccacacgatcgagcacataaggaatgcctctggacatgcatgcggcaataaagctgatgacttttgagatgctctgcaatgtgaacggcacattccattcaccggcatgaatcattgagccatccggctctaatatgcaaatgcccagctgagagtcgttgatttctccgagggcgggtatataatttgcgctttttccattgacggaaaacggtcggtaatgctcgacccaatcttgtaaaagtgaagccagttcctctttttcaaggcgctctctgaccatatctttcataacattcctcctctattgcaagcctgtccgaagcggaaaccggtcttggaaaacgttttcaaaaatagcgtgttccatgttaatgtataatgacatctacagaatcatacaaaatacgacaaaatcattcttaaaataagccgatagatttataaatcagccggagtgtcccgccattcgggtctaaagaaatttgcggactgtatcggtcttgttcaaaatagacagaagaaggaagtgattatgatcaggctcgactatttactgaaaaaagacggctatcttttcgctcttatgctgatcaccgtgccgctggcgggggaactgaaattttaccccctgaatgaggtatatcggatcagcttcggcgccccggcttttttcttttttcttctgctgcttcggcatgtgccggcggtattgtcagggctgttgacaggtgcagccgttgtgggattccggatcggcctggcgtgctgggggggagagcatgccggatttacggcggcttttttcagccaatatcccagtttctttttttactttacatatgcctgtttgttttatgtgctgaaggtcaggcttttttgggatcggccgctcatgatcgggtttctcggttttctcattgaaatggcgtccgatgccgttgaaatgacggttcagttttccggcggcaagcagattatgatgccggacaagctggcggatattgcggttatcgctgtttctcacacatttattgtgctgagttttttcaacgtgatgaagctgcacgaatctcaggtcagggaaaaacaaacgagaaagcagcatgagcacatgctgatgattgtgtctaacttatatgaagaaacgattcatctgaaaaaaacgctgaaaacgacggagcatgtgacgaaagaatcctatcagctgtatcgggaaatgagcgggaacgaccgggagctcgggagccgaatgctgcgccttgcgggagaaattcatgaagtgaaaaaagacaatcagcgaatattcgccggcctgtcgaagctgatttcaaatgagagattccgggattacatgaatgccgccgatctggtcggcctcgttatccgcatcaatgaaaaatacgccgaatctttaggcaaagacattcaattcaaaaacgtgattgaaggagaacaccccgattatcacgtctttaccgtcctgtcgatcttaaataacctgaccgccaatgccgtcgaagccatgggtgacaggggtgagatccgcctcgcgctgcgcagggcggagggggggatggccgaatttgaggcggaagatgacggtcccggcattccggaaaaaatcggagaggtcgtttatgatcccggttttacgtccaaatacgatgaattcggcgcaccttcaacgggcatcgggctttcatacgtgaaggaaatcgtaaccgaacttgacggagacatttcctttcataacaagccaaaaggcgtcatatttacgattaagctgccggtgaagcatttgattgcagaaaggatgaactcataatatgcgtttttttatagctgatgatgaccgggcgatccgttccattttaaaacagatgatcgaggacgaggacttaggagaagtcgtcggtgaggcagaggacggaagccagattgaagggcattatctccatttcaaacaagtcgatattttattaattgatctgctgatgccgggccgggacgggattgagacgatacggcatcttcagggggcgtacaacggaaaagcagtgatgatatcgcaggtggaggcaaaggaaatggtgggagaagcttattctctcggcatcgaatactttatccataaaccgatcaacaaaatcgagatcgtcaccgttttgcgaaaagtaaaagagcggattgaactggaaacctcgatcggcgacatccaacactcgttaagccgtcttattcagcggaatgagccgaaaaaaagcgggccggggggatgcacgagaaatcaatcaaagaaacaggaaaatttcttttgtcggaattaggcatcgtgggagaaagcggggcgcatgacctcatggccgtccttcactatttatttgaggatgaacaggcggaaagaaacatcccgtctttaaagcagatgtttacaaacgccgccatccggaagctgggacctgcggcggcacaagccgaggttaacagagaaatcaaagcctcggaacagcggatcagaagggccgtcattcattcgttaaaccatttcgcttcattgggcacaactgatttttcaaaccccaaatttgaatattacgcctcgaaattctttgatttccccgctgtcagcaagagaatgaaagaaatgcaggccaaggaaaccgtgccgctttctccggttaaagtgaatatgaaaaaattcattcacgtcttttttttggaggcgaaagatttacgcgaaggatcaaaatttgtcagcggaggcagccggtaagctgataaatagggtttacgtatataaggtttttgtgtaaaataatgttaactaagaaggaacggagggatcctgatggctgatcaaattccggttttcgcactaatgaaatagtgtcaaagtctctgccttgagcgcggaggaaaccgggattgtctgcctgaataaggaacctgacagtaatagtgagggggcggcgattatgccgccctctttttggcgtcttcacacatctctttcttctccgcctaaaggcgaagctctgtgtcagtcaataagggaaatggggaaacaagatgacaaaaaaacaaagggaaatagaatccgttttgaacatcgcaaaggaaaatggcttacggttaaaatatgaaggggcggacataaatgaaacgggtatggacttccaagtcgtatttgctgaagatgacagcggcgtgacatgggtgctccgaaagccgcgccgtcccgatgttatcgaaagagcggctgcagaaagcgatgttctcgcgtttctccgcagccatgccgctgtatcagtccccgattggcggattcatacaccggaactgatcgcttatccgaaactggacggaataccggctgccgcaattgatctggataagaaacagtatgtctggaatatggaacacgagccgccttcagacggttttgtcggctcgcttgccgcagcattagccgggctgcacggggcagacacggatgcggcctccagatccggaattgaaatcataaaaccggatgacgtcaggcaaagggcggcggaatcaatggatcatataaaaaaagaaatcggggtttcagaacagctttggaaaagatggcaaacgtggataaatgacagctcgtactggcctgatttttctgcgctgatccatggcgacttgcatcctccgcatattttgatcggcgaaaatcagcgtgtgacgggtctcctcgattggacggaggcaaaggttgccgatccggccaaggattttgtcctttatcaagtgatattaggagaaaaagaaacaaaacggctgatgaagagctacgaagctgagggcgggcgcgtctggccgaaaatgcaggagcatgtgtcagaatggcaggccgcttaccctgtggaaacggcgaagttcgcgcttcagacggggcaagaggagcatatgcaaatggcgcgggacatgctcggactgtccgatccgaaaggttattgacttccgccggatgacagcgtatgatacattttaaaatcatagaacggatgaacaatgctgaggaagagtaagtacgcatcagcgcgcggggttcagagagtcggtggccgctgtgaaccgatccccgtccggtgccgaatgggcttctgaattgctgcgctgaaataacagtaggcggtgccgggattctttccccgttatcaagataggagtattgaaaccctgagtttctgtactttttgagagaatggctcttcagccgttaataaaggtggcaccgcgaaaacctcgtcctttgatggacggggtttttttgcgttgttaaggaggtgatggccatggaaagtgactggagacggacagacaatcaaaaaaggagggatattcatggtgatcgcaaccgacgatcttgagctcacatgtccgcattgtgaaggaaccggcgaggagaaagaagggacgccctgtccgaagtgcagcgcgaagggcgtcatattgaccgctcaaggaaacacgctgctgcattttatcagaaagcatatggatcagtgaaatcaaacgaatatgtaaagaaacagcacaaaacaaaaaagcttgtagaaaaaacatcgttttctctacaagctgctttttcattcttcaaaataaggattcacatggatgagcacttcttcaacatctgaaaagtgtcttttgatttcatttcggatttcccgggctatatcgtgtccctgcttaatcgtcaaatcatgatccaaagataaccggacatcaagcaatttatagtggccgtgttctcttgctcggattttatcgagccgtttgacttgagggcaatccaaaataaccgctttatattcctctatcagttcgggatcaacacttttttccatgagaacgtcaacagacggcctgattaattccattgaaatcttaaaaatgaggtacgccacgatgacactggcaattgcatcggcgtacaacagataggaccatccgcgtgtgttcccgataatcgccaataggacgccgataaaagcggcaagagaggcaacgatatcgcctttatgatcgtatgcaatcgctataatcgctttactgttccatttttccccttgtttgatcgaataacgatataagatctgcttagccacgtaggatatcagagccgcaaacaatgcgctgtattgcgggatgcttggaccttcaacaaaggacgaaatcgcttctatcagaatatacacggaaacgagcactaatatgattcctacaatcgcttcgctgatgatctcagctttgccatgcccgaaaggatggtcttgatcgggcggcttattagaaatgccgatgacggccaggacagcaattgaagccacgacatccgctgcagaatgtataccgtcggcaaaaactgcttcactatcgcctatcagtccaaaaaagatctttcctgccattaagatcagattggctatcaatgcaatcaaagcaacttttttgcttatttgttctctttcacttgtcattttttcctcctataaaactgcacaaaaaaataggagcgctcttgattcgctctccgtatcctttcttgtgtaatcactttgcttatcatatcaattcagtttcgagtgggtctatagcaaggttgtttcctgtttactaataaataaggtgacagaaaaaaagttggagcagggctaaatagtacataaacaaaattgcgctgaatttaaaaatgaactgttgacatttgagtatttatcttttattattatcctgaattcaagatattttaattcgagacaatttaattagagtgcaggataagaacctgccgatcgttttgttttttgatcatacattatttgattttttataccataatatctcgaattcgagataaaggggagtgcgagagaaatggctgaatttgtacagctggtgaatgaaagaagatctgcaagcaactttcttccagaacatccaatcacaagagatgagctcaacgaaatgtttgaattggttgcgttggctccatcagcttttaatttgcagcatacaaaatatgtgacggttcttgacccggaggtaaaagaaaagctgaagcaggccgcaaacggacaatataaagtgttcagctcatcagcggttcttttggttttaggggataagcaggcatatcagcaagcggctgacatctatgaaggattgaaggtgctgggggtattaaataaacaagagtatgatcacatggttcaaaacaccgtttcgttttatgaaaacaggggagaactgtttaagagagatgaggcgataagaaatgcttcactttctgcgatgatgtttatgctgagtgctaaggaaaaaggctgggacacctgtccgatgatagggtttgatcctgaagccgtgaaacagattttgaatatagatgatcaatttgaggtcgtcatgatgattacaatcgggaaagaaaaaatagaaagcagaaggccgcgcggctaccgaaagcctgtgaatgagtttgtggagtatatttaaatatttataaaggagcgcataaaaatggctaaaaaaacgatgggaatccatcatattacagcaattgtcggccaccctcaagagaatgctgatttctacgctggagtgctggggctgcgattggtcaagcaaacggtcaattttgatgatccgggtacgtatcacctttatttcggggatgaaggcgggaagccgggaacaatcatcacattctttccgtgggcggacgcccgtcaaggcatcattggagacggacaggttggcgtgacatcttacgtcgtgccgagaggtgctatggcgttttgggaaaagagacttgaaaagttcaacgtgccatacacaaaaatcgagcgttttggggaacaatatatagaatttgatgacccgcatggcctgcatttagaaatcgtggaaagagaagcaggggaggccaatacgtggactttcggagatgtaaccccggatgttgccattaaaggctttggcggtgcaaccctgttatcagcacagcctgaaaaaacaggtgaactgctggaaaacatcatggggcttgagcgagtcggcaaggaaggagacttcgttcgttatcgttctgccggtgatatcgggaatgtgattgatcttaaattaacgccgatcggccgcggacaaatgggtgtcggcacagtgcatcacatcgcttggcgggctcaggatgacgaagatcaattagattggcaaagattcattgctgcgcacggatatggtgtgactcctgttcaggatagaaactattttaatgcggtttacttcagagaacatggggaaatcttatttgagatcgcaactgatccgccgggctttgcccatgatgagtcacaagaaacaatgggcggaaaattgatgctccctgagcagtatgaaccgcaccgggcacaaattgaacaagggctgctgccgtttgaagtaagagaattagattgatttgacacataaaaaataaagaaacatatagtcaattgatgattgctggatggtaccgtccagcaaagaatcagatgaaatcaaagatgaggagagataaaaatggaagatgcaggactattacttattcgaatcatgattggtgtggtgtttctgttttatggatcacaaaaattattcggctggtttggcggatacgggattaaaggaaccggacaatggttcgagtcaattggagttaaaccaggcaatgccgcggccgctttatcaggtctcggggaactcgcaagcggaattttatttattttaggtgtattcctcccgcttggagctgctatcataacgatcattatgttaggtgccattgtaaaagttcatggagcgaaagggtttgcgaacggtgccggcggttttgaatataacgtggtgctgattgcagtctccatcggagttgcactcatcggttcaggagcttacgctttgcatttttaatataagtatctaagaacagttactgaaaagcggtaactgttcttttatttttcaagcacgacgttaaggtgctctgaatcgcaaaaaagcggatatgatcaatataaatgtgtatagtgaatgtacgagtattgatgagcttggtcatgaaagacgagccgatttgaaggagggttttgatgaaagagctgacagacttacattcattagattctatcgagaattttattaagcagcatcaattcagttttatctacatttcaagacctgcctgtacagtatgtcacgctgttctgccgcagctcagaaaagttttggatcagtttccgaatatcaaattggggcataccaacgctgacgaggtagaagaggttgccggcagattttcagtcttcactgtccccgtgcttcttttgttcattgatgggactgagtttctgagagaagcccgctttgttcattttgaacagctcgaaaaaaggctgaaaagggtttatcagttatatcaagatgtataaagcgttactttacaaataaaaagccccctttaaggggctcaggctgtctagaaaatctcgacagcctttatttttcccttaaaatatccattcccctgtcatataataaaagacccgcacaagagacgcttctcaaaatacagccgaattcgttctgtttgaccaactcgttgaagaggatcacctgcttcgaaaaattgatcagtacatagacttctcttttatcgttgaaaaggtcaaaccttactgcaacgaaaataaaggccgcccctcacttgatccgctgatcttattcaaaatgatgttgaaggttgccgcatacccagccaagcaaggctgggcatatgtaaagaaacagcaaaaaacaaaaaagcttgcagaaaaaacatcattttctctacaagctgaaggccgttatccggccttttttacattattcggaccggggttctaaaaaacgggaccctcccaagtcttttctcatcagatagatatggaaaaaatattctccgacggcgatgatgacggcggaaatgagagcggcaaacgccagtcttcctccggaaatgcccatggacagcggcattcccatcagccagacaacaagaaacgcgattccgaaatcagcggacgccgccgtgatattattccatctcggaagcacgtacaggtcgcccgtaaagtaggaaacggctcccagcacaatggtcatcagcagcacgtcaccgaatgtaaagcgaaaacctaagccgagtatcagatacagaataatgatggtcataatgcctttaatggcaagcgctttaatgtgttccattcgaattcctccttatggaaatcatgttagtatgtttcctcataacgtgaaatataaacccttttttcgtgaacatttgttttctggcttttggctgtcatcactgggccgctgctgaatatgatgaaaggagaaaatacgggaggtgtcatgatggcagtcgtaaaagcgtcgagcgccgatgtcgatctaatggcaaggctgctcagggcggaagcggaaggcgaagggaagcagggaatgcttttggtcggcaatgtgggaatcaatcgggtgcgggcgaattgttctgattttaaaggcctgcgcaccatcaggcagatggtgtttcagccgcacgcgtttgaagcggtgactcacggatacttttaccagagaccgcgtgaatccgagcggaggcttgcccgcaggaacattaacggagaacggttttggccggctaagttcagtctgtggtactttaagccgccgggcaactgcccgcagacttggtatggccagccgtttgtcgccagattcagatcccactgcttctatcagccgacaggtgagacgtgcgaaaacgtgtacaatacattttaatcccgggggcaccgttcttaaaatgaacggtgtttttttaatgttttgtgaagaaaaataggaaaaaagtgcgcttgacggatgacaagccaaaaagaaacagagggggttttcttccggcggggcaaggtttgtcgaaacaatgtgaaaaatgtctcccgccgttcatttttcagccttacaaacccttcacacttcttcatagcggtttaacatttcttttttataataagggcgatcaataagacgaaaggggaactgacatgacacatgacggccgtttagatgaatggatcaaggaattggagaacaaaagctttcagaacaatacgtttgaccgccgcgcatttatacagggcgccgggaaaatcgccggtctttccctcgggttagcgatcgcgcaatccatcggcgcgtttgaagtgaatgccgctccgaaattttcaaactatccgttcaccctcggcgtagcttccggcgacccgctgtctgacagcgtcattctctggacgcgtcttgcccctgacccgctgaatgggggcggcatgccgaagcaggccgtgccggtaaaatgggaaatcgccgcagatgaacatttccgtcacatcgtcaaacgcggaacggaaatggccaagccgaatctcggacactccgtccatgtcgaggcggacgggctcaagcccaataaagtgtactattaccggtttaaaagcgggcatgagctcagccccgtcggccggacgaaaacgctgcccgctcccggcgctgacgtatcggccatgacgtttgcatttgcctcatgccagcagtatgaacacggctattatacggcgtataaacatatggcgaaggaaaagcttgatctcgtattccatctcggagattacatttatgaatacggaccgaacgaatatgtgtcaaaaacgggaaatgtcaggacgcacagcagcgccgaagtgtacacactgtcagattaccgcaaccgtcacgcccaataccgctctgatgccaatctgaaagccgcccacgccgcatttccgtgggtcgtgacgtgggacgatcatgaggtggaaaacaattatgccaatgttatccctgaaaaaggccaatccgttgaagcgtttgtgctcaggagggccgcagcttatcaggcttattatgaacacatgccgctcaggcgcatgtcattgccgaacggtcctgatatgcggctgtacaggcaattttcttatggcaatttagcatcgttcaatgtgcttgatacaagacagtacagagatgatcaggccaacggcgacgggaataagccgccttctgatgagtggagagacccgaagcgcacattgatggggacagagcaggagcaatggctcttcggaaatttagccgcctcaaaagcgaagtggaatgtgctggcgcagcaaatctttttcgcgcaatggaatttcggaacaaccgccaatccgatatacagcatggattcatgggacggctacccggctcagcgggagcgggtcatcaattttataaaaagcaaaaacctgaacaatgtcatcgtgctgacgggtgatgttcatgcaagctgggcgtcaaacctgcataccgattttaatcaaacgaattcaaaaattttcggagccgaattcgtcgggacttccattacatctggaggaaacggggcggataaacgggccgatacggatcagatcttaaaacaaaacccgcatattaagtttttcaacgattaccgcggctatgtccgctgtacggtgactcctgcccaatggagagcggattacagagtggtgccgtacgtgacggagccgggggctgaggtatccacgcgggcttcattcatttatcagaaagaccagacggggattcggaaggtctctcaagcggcggttgcaggcggtttaaagcagtcaaacgaggtggaagaggatcgtttcttcgcccataacaatgcgcatgaaaagcaaatgagaaagaaacgggccaaaatctcacaataaggaggcacactcatgttttcaaatatcggcattcccgggttgatcctgattttcgtcatcgctctcatcattttcggaccttcaaaacttccggaaatcggccgtgccgccggccgcacgctgcttgaatttaaaagcgccgcaaaaacattggtctcaaatgaagagccggacaagcagacggctgagaaagacaaaacggcaggctgaatcctgacatgggggcagacgaatccgcttctgcctctttctctataaggaggatgtacgattggataaaaaagaaacccacttgatcgggcatttagaggaagtccggcagcgtctcattaaaatcgttatcgcctttctcgtgttttttatcggcgcctgctggtttgtgcaggatatttatgactggctgatcaaggatttgcatggcaggctggccgttttagggccgagcgagattttatgggtgtatatgatgattgcgggaatatgcgcccttacggcagcgattccggttgcggcctttcagctctggcgttttacggcgccggctttgaccccgttcgaacgccgcgccgctttgctttacattccggggctttcgcttttgtttattatcggaatttccttcgggtattttgtgctgtttccgattgtgctcggatttttaacacaattatccgccggccattttgacatggtatttacggcggacaagtattttacctttatgctgaatcttacattgccgttcggatttttgtttgaaatgcctctggccgtcatgtttctgacacggctcggaatcgtgaatccaacccggctggcaaaggcgcggaagctttcgtattttttgctgatcgtcgtctcggtgctgattacgcctccggattttatgtctgactttctcgtcatgattccgctgctcgtcctctatgaaatcagtgtgacgctgtcccgcatcgtttaccggaagaaatgggccgaggtgtctgccgcttagtgaagctcgcctccgccggtctcaatatcgtcctcatgcgccgcggcggtcaccgcggcgattttgagcgcttttgtcacgagatccaggctgaggctcggcgcagacttctgcaaggtttgctccggaatgtacgggatgtgtataaacccgccgcggatgtgcggatgatggcaggcgatttcatccatcagcccgtaaaagagatgattgcatacaaacgtccccgccgtgtaggatacagccgcgggaatgccttcctttttgatttcctcaacgatccgtttgatcggaaggccggtccaataggccgcgggaccgctttgagaaatgttttccccgacaggctggtttccttcgttatccggtatgcgcgcctcattcagattgatcgcgacccgttccggcgtgatctgcattctgccgcctgcctgtccgacacaaatgataatgtcaggctgatgctttttgaccgcttcgcgcagcacggcaagagacttataaaaaacggtcggcacttgttcggatacgatagaggcagggccttcatgggaaccgtccagccgtttgaccgcttcccatgaaggattgaccgtttccccgccgaaggggtcaaagcctgtcagtaatacttttttctccatataaaaccctccttttctttttaccatactctataatggacatatattcctgccgaagggggaaccatgtcttgaattcgcctctggtgcaataccgatctttatttccggtgctccgcacacatacgatgctcgccagctgctctcaaagcgctcttgccctgccggtttcaaaagcggtcaatgactatcaggaaagcctgtttcagcatggcggaaactgggaagaagccattggacgtacggagcaggcaaggtgtgaatttgcaaaattgatcggcgcccatcctgaagaaatcgccgttttaccttcagtaacggctgctgtctctgccgtcgtttctgctttaccggattgccgaaagaaacaggcggtgtatacggaattggattttccggcgatcgcccacattttgaaggcacagactgagatggagctttcagtcgtgccgtctgaagatggaatgatcccgttagagcggtatgagacgtacatatcggagcagacgcttttcacctgtgtgccccatgtgtcatatacgtcgggttttgtccaggatataaagcgcattgccgagatatccgcaaagaagggatcgcttctttttgtcgatgcttatcaatcggcggggcacatcccgattgatgtaaaagaatggggagttgatatgctggccgcgggtgcgagaaagtatatgctcggcataccgggaacggcgtttctttatgtcagaaaggaacttgccgaacggctgaagccgaaagtcaccggatggttcgggcagcagcgggcgtcgatgccggatttaacccgtttttcttatgcggacggagccaaacgctttgagaccggaaccccggcatttatcagcatatatgcggcacaggcggctttatctctattaaacgatgccggcacagaccgcattcaccaagaagtaaaaaaactcagcgcatttgcgtatgaatacgcttctgaaaaaggactgaatctcacagggccgccgtctgccgatgacagacccggcatgatttccatacgggatgaaaaagcggcggaaacggctgcgctgttgaggcggaaaaacatcgtatgcgcatccagcggacaaatcatccggctggcgcctcatttctataacacagctgacgatctgatctatgcgattgatgaactggctgaagcgcgcggtatataaaaaaacagcagactcacggggagtctgctgttttcttatgaatgattcactttgacccgtttcataaagaaagcgctgatcaagccgataacggcgacaatcatcgcaaagataaaggcgtgctggacgcccgcaatcagcgcgtgagagtatgcggaaggatcattcgggtttttcgcggtgctcatataattcttctggccggcagccatgatgctgaccgccaccgcagtgccgattgcgccggccatctgctggagcgtattcataatggctgttccgtccgggtaaaattccggcggcagctgatttaagccgttcgtttgcgccggcatcatgatcatggaaatgccgatcatcaggcatgtatgaagcgcgacaatcagaagcgccgtagaagcgccgttaatgtttgagaaaaacgaaagcacagttgccgtgatgacaaacccgggaatgacaagccacttcggcccgtatttatcaaacagacgccccgtcaccggagacataaagccgtttaaaataccgcccggcagcaggatgagcccggacgtaaacgccgtcagcatcagtccgctttgtaaatacataggcaataggagcattgtcgataagataaccatcatacagataaacacaatcacgacaccgagaacaaacatcggatagcggaaagcgcgcagattcatcatcggctgcttcattgtcagctgcctgatggaaaataagatgagcgcgatcgcgccgacagtgagcgaaccgataaccgtcgggcttgaccagccgtctgatccttcgcctgcattgctgaatccgaatacgatgccgccgaacccgatcgtagacagaataatggaaagcacgtcaattttcggttttgtaatgtcagacacgttctgcatgtaggcgatgccgaataaaagagccaacacaagaaacggcagggaaatccagaaaatccaatgccagttcaaatgctctagcacaagccctgaaaatgtcggaccgatcgcaggagcgaacataatgacaagcccgatcgtccccatcgccgctccgcgcttatgcggcgggaagatgacgaggattgtattaaacatcagcggcagcagcagcccggttcctaaagcctgcacgattcttgccgccaaaagaaacggaaagctcggcgcaagcgctgcaatcagcgtgccgataatggaaaaagcgagtgaaacgatgaacagctgtctcgtcgtaaaccattgcaaaagcagacccgataccggcacaagaataccgagaacgagcagatagcccgtcgtcagccactggacggtcgcaggagtgatatgtagctccttcatcagatcagtcaaggcgatattcagcgccgtttcactgaacatgccgataaaccctgccgtcagcaaagaaatcatgatcggcatgactttatattgtttggaaggctgagcgttttccaaaatcattctcctctctttctatacgtacatgtctctcgtattttatgtcttcagcaggttggggatttgtttagaaatatggaggatcggcattttgtcttttttggctaaggacacaatgatgccgccttctatcatggcatttaaaacagtgctgatttccgccgctttctcatcagaaaaaccggctgatcttaatttgcccgcgaacagattctcccattcctgataagcgttttgacaggcctgccggagcttttcgctctttaaagcagtctcggcagccagtaaaccgacaggaaacccttcaaaattctccggacatgtgaattggcttgataagtcctgtaaaaacgcttgaatgctttccgccggatcaagatgagcatcaaggctttcttttattttcatacggatataatggctcatttcattgacagcctcaatggcgagctgctctttgccgtccggaaaatgatagtaaagagaacctttcggcgccccgctttctttaataatctgattcagtcccgtgccgtaatacccctgaagctgaaacagcctggttgccgcggcgaggattttttcccgagaatctccatagctcataatgttcccaccttactgatttgtgacaaatttaaaatatagtgactggtctattatcttgatttcgcatgacggtgtcaaggttttttaacggttattttcttcggaagaatgcctgacaagcgcgttgaccggtgagaggaaaatcatcataaataaagaaaaggagagaaaagaatgaaaaaacaattcatgcccttcattacatttatcacggctctgctcttcatcgcggccggctgctcccaatctcctcaaacgaaagaaacaccgccccagatggcagccgcagcctctgcgaaaaaagacggacttccgaatattaaaattcttgccaccggcggcacaattgcaggcgctgctccttcaaagacgtccgctacggagtacagggcgggggcaatcggagttgatgccctgattcaggccgttccggagataaaagaggccgcgcatgtgagcggagaacaggttgtgaatatcggcagccagaatatgaataacgagacactgctgaaacttgcaaaacgggtaaacaagctgctcaagtctgatgatacagacggcattgtcattacacatggaacagacacacttgaggaaaccgcctactttctcaatctgacggtcaagagtgacaaacccgttgttgtcgccgggtcaatgcggccgtccacggcgatcggagcggacgggccgtccaacttatataacgcggtaaaaacagcggctgcgcctgaggcgaaaggcaaggggacgcttgtcgtattaaatgacagaatcgcttcggcgcgttatgtgacaaaaaccaatacaaccgcgaccgacactttcaaatcggaagaaatgggttatatcggaacaattgctgatgacgtctattttaataacatcatcacccgaaagcatacgaaggatacagatttcaagatagataaacttgataaactgccgcaggtcgatattatatacggctatcaaaatgacggaagctatctctttgaagccgccgtaaaatcaggggcgcaaggcattatttttgcaggcccgggaaacggctcaatgtctgatgcggcgctaaaaggcgctgtaaagtcggtcaaaagcgggctggcggtcgtccgctccacaaggacgggaaacggggcggtaacacctaatcgagagtatgaaaaagaccatttgacagcttcaaactctctcaaccctcaaaaagcgcggattcttctcatgctcgcgctgacaaaaacgcaagatcctaagcggattcaaacctatttcaatgagtactaggagtagagaaccgggtgttctctcctttgtcggtatgccgtattaaagcataagcgtgctttcgggaaaggggcgtctttctcatttttccgctcttttttaattgttgaaaacagtaaaaaatacactattttttccttttcttctctaatagaatgaaaactgcaaaaatattacatagcaggaggaaagttcatgaaacatataaaaagcaaaatcctagtcatccttacagtttgtatgctgtccgtcatttccgtatttgccttccagccgaccgtatcgaaagcctcctcagggcataaccctgtagtcatggttcacggaatcggcggggcgtcttttaactttgcgggaatcaaaacatacttggcatcccaaggctggtcaagaaaagagatgtacgctattgatttcttagacaaaaccggaaacaacagacacaatgcgccgagactgtccaattacgtgaaaaaagtgctcagcgaaacaggtgcgaaaaaagtcgatatcgtcgcgcacagcatgggcggcgccaacacgctctattacattaaaaatcttgacggcggagacaaaatcgccaacgtcgtcacactcggcggagcgaacggccttgtgaccaaccgggcgcttccggggactgatccgaaccaaaagattttatatacatcgatttacagctcagcggacttgatcgttctgaacccgctgtcacgactgatcggcgggaaaaacgtgcagattcacggtgtcggacacatcggacttttgatgaacagccaagtaaacgggctgattaaagaaggtctgaacggcggcggacaaaatacaaattaacagtttcaaagccccggagaatgagaatatcccggggcctttttttcttccatattcttttttcgccgtaaaccaagccctctgaagttatttttgttaaaataataaagttatatcagaattcggagggtttattgtgggaaaagtgaaaagaaatgccccttgcccatgcggcagcgggaagaaatataaaaaatgctgcggaagcaaagaagctgccattccggcagacatcgcggcaaaagaagcgaaacagattcaggaaagcttaatggagtacgcctttacagcacatagagacggcatatcatcatttattaaccagcatgagttcattacggagctggacagacagactaaagacatcggagtcttcaacctcggtatctggggaattttcttccgtccgctggcaggcggcaagacgatttttgaagaatatcttcagaaaaaagccggcggcatcaaccgtccgaaaacacgggaaatcgttgaatcatggaaaagcatgacaccagcggttatggtgcttgaagatgtgaaagaaggaatgattcactttgaagatgtgatgaccaagaaacaattcaaagtggaaatggacgtcagccagcaggatcttccgccggcgggaagcctgattctcggctatccgatccacgaagcggaaaaagcggagttctttatgcagtttacgatcttccctgtgaagcggaccgaagctctaatcagcaaagtgaaaaaggcggctgccccggcccttgcggaaggaaaatcgcctgagcgctttatgcaggaggacttcgacactgtgctggccgctcttttaggaacggcggaagagcctgagcaggctgctgaagaaaaacagacggagtgggcgaacgacatggagaaggaaacggcggacgccattgaaaaaggcctgagcggggatgaatacccggctgagctggttccggccgttattgacctgtggaaaacgttctgtgtcaaaaaaacaccgacgatcagaaagccggaagctttcgcggcggcggttgaatattacgtaaacagtatttctctgaacggcgcgtccgtttctcaagccaagctggcgaagaagtacggcgtcagcgcctcaacgatttccagccgctataaggaaatcgaaggtgctctcacagatgaagccgaacgcttcgccgcagctctgacatcttaatacacagccaaaaaaccttgaagggcacatgcttttcaaggttttttctgcagaaatgctctcggggcaggataattcttaccagttatctaatactaaacagagcgataaaaggaagggagcctgagccatggatgagacacgtacgctgggcaggacggatttacgggtaaagcgtatcggctttggcgctaatgcggtcggaggacataatctgtttccgaatcttaatgatgaaacgggaaaagaactcatccgcacagcgttggacggcggcgtcaattttattgatacggcgtttatatacggtttggggcgttccgaagagttaatcggtgaagttgtcgcagagcgcggcgtgcgggacagcctcgtgattgcgtcaaaaggcgcgcacaaagaggtcaacggacaaatcgagctggacaacagccgtgaatttctccgtagtgaggcggaaaacagcctgaagcggctgaaaacagacgtgattgatttgtattacgtccacttccctgacggcaaaacaccgctctccgaagtggcgggcacgctaaaagaactgaaggacgaagggaaaatcagagcaatcggcgcgtccaatctcagcttcgggcaattgcaggagtttaacgccgacggttatttagaggtttttcaatcagaatattcactgattcagcgtgaggcggagcatgatctgctgccttattgtgaaaagaacggtatttcttttattccttattttccgcttgcttccggcttgctgacgggaaagtttacaaaagacacagtctttgaggacagccgaaaaaacaggccgccgtttcagggagaagcttttcaccaaaacctggagcgagtggataagcttcgggccgttgcggaagaaaaaggggcgcagacagcgcatatcgcactcgcgtggcttctgtcgcagccggcggtggatgcgatcattcccggagccaaacgccccggccagctgaaacacaatctgggcgcgcttgatgtgcaattgaccgaggatgaggttcaatatatcagtgacatcttcaagtgaaaataaaaaaaggaaatagcctgcgctatttcctttcttgctgtcaggacgttttcaaaaacgcttctgtcaatccttccagatcggcgtctgtatccagataccactggccgcgggcgtttttcttcatctcgatttctcttgttacggaagaagaagccggtttcaggcgcataaactcttccggatagacagaaagcaggtggctgacaatttcgttttcatcagcatcggggtgctttccggcatagtcttgcacgcggtcttgcagctggcccgcgagcggagacatatcaagcggcgtcacttttgcttcaaggacggcttttttgcctgacatggatttggtatgcaccttgagctctgtgttatcccgaagcgctgatgacatggcgtcaataatagcggaaatggcttttgaatccgcctgttcttgtgaaatgcctgcagaagcgataaagctggctttcgccgattcctgatatgcggcggccgtcattttttcatttacaccggtcaggcgggtgaaatctttattgtgcttgccgtacagcatcacatcaatgtatgcggataatgcgtccgccgggtcaggttttgcgtttgaggctgtgcctttgactttcagtttataagataaaggcttcgcgtcttttgcctgcggctgatataccaattcatatgatttgccttcgtcagccgtgaagtacagattgcccgtcactgtcttgcccgcatgaagcgtgccgctctgcatctggtcatccttatcggccgccgctgttttcgcgtcatcctgataaagcgagaagtcgctgcttttgacggtaagcgggtctttgcccgtatttttgacggtgaccgttactttcagcgcggccggatgttcagtatcgtctgaagcggcccatgccgtctcttttattttcactttcgccgtgctgctttcctggccgccgctcgtttcgctgctgcatgcggcggtaaatgccgtgagaagcagtatgaaaaacacggcgctcatttttttgatggacatctggtttaccccctgttgttataatgattaattcaatagtcatgaagacagacaggttaattatactagttttgtataaaagagtcttggtaatcatcaatctttttggaagaaaaggaagtgttatgatgaaaaaagaagaattgaaacagctggctctccggatcggtaacgtacctgcccgctacgaaagtaatgtggaagaataccaagaagatgaggttttgttttggtgggaagataagaatgatccggaagccggcatcatggtcgaattggaccgggacggaaaactgaaatccttatcccgtccggctttccggactgatctgccggctctttcggaatcggacatagaagaacggatgcgggcgtttgtagaaacccatcgtccgggggcattggctgagttcgaattggaaaacagcggctccgcaaatgatggtgatgtgagatattcctatgttcagatggctgacggtctgccgcttccgctgaccgggttttacgccgacctgtctttgacaggggaagtaaccggcttttcttaccatgggaaggctgataatctcttaagacccggaacaattgcggacaagcgggaagcattggctcactttgtcaaacatattgaagcggagctgttgttcaccgtactgcatcagtccgtctatgtgcagggggatgacaagcctcatctcgtctatgaaatcgtgtctccgacgcggccgatatcggctgacctgaaggaagagaatgcagaaatagacgaatatgaagggctggaagacgacatgctgccgtatgtcccgatttcacgccctgcacctgaagcggaaaagatgagcatcaatgacatgatcgggctgcacgacggtttttataaagagagggaaactgatcttggagacggccgcatcggcattgcatggcgtcctgaaaaaacaaaatccgtccggaaagataaaagcttagaaagtctgtttaaagaacggaatgaacatgtattgaaaacaatgcatgataaagaatcgggccggctcgccggagtgatgtcatttatacatagtgaaggcgaaccggagttttccgaggaagaatgccatcacatggccatccgctttttattcgccatgtttccggaagcggatcagtatttccgggttcaatatgatgagccggatgatgaaggagaaaacgtgggacttacatataaggcttgttcgggcggcgttgatttgcgattcggagaggggagaatctgcgtcagcaaaaagacgggtcttgtcacgttttatatgccgccggaaattgatccgaaagagctggaggaaatcgatcccgttccttcattgacaatggaagaggcgaaggacgcgatccgccgggccatcaaagccgagctcgcttgggatcgttgttacgatgacggcagctgcggaaaagtgtacaggctcgtatacaagccggttttcccgcggtttattgaggcccatacgggagaagtgatcacgagtttaataggctgaaggtcatgggcgttcgtcccgggtcttttgcgggaattgtgactattgtatgaaaaacagccgctctgaatacggctcttttccctctttgctaaaaatagacacataaaaggcactttcttccctttaaaaggataaggacgtttttatataattaaaaacagttcttttttatacactcttctgaaaggatgaccccattgctgaaagaacatctgagaaaaaaagcgctggagatcgggaacataccgccgcactatgagcttgaaatagaagattatgatgaaaaacaaaaaacgagagcctattatatatggaaagatcgtaaccatccggataaaacggtaacgattgagctgggcgacgacggatctttgcttacctattcacgcaacgactgtccgggttcagacatgcagctgtcagacgccgaattaaagctgacggctcttcggtttgcggcgagacaccgcccgcttacttttatgaatttcatctttcaggcgagggaagaacgcaatgggtgcatccgatttatctatacaaaaaaagtgctcggccggccgcttcccgattcaggttttttcgttgatgtaaccaggagcggcttcgtcgtgcagtttatctattacggggataagggtgaagcgcccgtcccggaaacattcgtcgatcgggaaaaagtcgtctcgcattatatgagtgtgctgacattcagtctcgtctatgatgtggtcaattttgagaacataccgcgtctcgtctatgaaccgattctgccggcttacagctatccggccggtgaagatgatatcgtgccggatcagcagctttgcgaagacaggaatgagccggcaaaaccgcttcctgcgtttgaacataaacgggaaatcagcctggatgaattgatggggtttacctcggatatggttcagacgcgccggcgcgatctcggggatgagatcggaacgacatggcggaaagggtcggttccggaacggaaagatttgagtatcgaaagctattttgaaaccagcaacaaaaatacaatgaagatgaaaacggacaaaaagacagggaaaatgacagcctttaaatcttttattgagcatcagggcccggccttttattctgcggaagagtgtgaggccgtcgcgcttcaatttttatacaagctttatccgagagcggacgagttttttaaaatgaacccgctgaaaacggacggaaggggcaggttccgcttccatttttccgtatggcatcaggatattccgctgcggttcggcgctgcgagaatacttgtcagtcccgtaacggggcttgtggaagcttatatggcgcctgacattgacccggagcagctggagaagatcaatccggtgccggccgttactcccgaagaagcaaaggccgcttttttatccgatttccatctgcggctggagtggcagcgcgattttacgccgtccggcaatgaaggatataagcttgtgtacaggcctgtctatcctccgtacattgatgcgcagaagcgaaaaaagaaaaggttttattagccagggatcatttgtaaatgaggataatctttaaagcctctccaatcgcctccccaatcaaaaccgagcgttttggcaatcgatacgacctcaagccaatcgggcgtgccgtttcggtttccgtcgtacgtcatatcccaaatcaggcttccatcctttttttgcagggcgaagtcgatcgcaaggccgtaattgtggtaagattccccgccttttgcgtaggtgacgatatttcctttttttgaacgtccttgacggtacaattcgttttgttcctcaattgatctgaaaccctctgtgataacgacggtgatgccttttttcagagcggccgtccgcaatagctccgcattctgtttcacgagcggatgaagagcgcttggaatggctctatcttgtaatgccgtctgcggcctcaattctttctgcacataggaaaaacataggtctgcggaaaagaagaggatcagaagcagcgaaattctgactggtagtttcatggtgaattctctctttctttaattgattaaaatctttgtttgctcactgccataaatttgctatgataaaatataacataattagtagccggaggaaggaggcaaatctatgaaatccaagattccatctgaagaagtggccgtaaagatgaatgaatggtataagctgatccgcgcgtttgaagccgataaagctgaagcgctgaagcgggagattcaatatgaactcgaagatatggaagaaaatcaggatttattgttgtatttttcattgatggaatttaggcaccgcatcatgctggataaattaaaacccatgaaagacggcgactgccagcctccgttctctgaaatgctcactgagattgagatgaaccagcaaaagctgaccggcttactggaatattatttttactatttcagaggaatgtatgaatttaagcagaaaaacttcatctcagcgatttctcattataagcgggctgaggaaaagcttgaatatgtggaagatgacatagagaaagccgagtttctgtataaaatttctgaggtgtactatcatatcaagcagactttcttttcgatgaattacgcggggcaggcgcttgatatttacaagaaatatgaattatacggaatgagaagggtgcagtgcaaatttatcattgccggaaatctgatggacgcccagcagcataaaaaagcgctggaatacctcgaatgcgccttggagcacgcggagcggcttgatgatcaatatatgattgctgcggcctattataatatcgggcactgtatgtacagtctgggtgacttttgcaaggcggcggaggattttgaacgggcggctgccggatttgaagcacacagcttccggcaggtcatccaggctgttttttcactcacgcatatctactttaaaacggaaaaatacagtgaagccgccgccagctgcgcgcggggcatgagaagcgcggcggagtgggaagatgagatctatatgacgaaattccgtctgattaaagagctttatcagggggaaggcggacaggattcgctcaaagagtattttgacatcctggaatcaaaggagctgttggctgacacagaggaactgcttcaggacgcggctcatttctttcataaacgggagaactacaaagcggcatcttattttttcagcaggcttgtcggcgtgcaaaaaaggctgcaaatgaacaactacgcataataaaaaaaagaacgagggagcttcggtttcatcgttctttttatgattccttttgttttcagccgattaaaaccgggtacatgctctgtattaacatcagggaggaaatgagacaatgtatcaggatttacaggggaaaacagcgattgtaacaggttcttcgaaaggaatcggaaaagccattgccgaacgcttcggcaaggagcggatgaatgtggttgtgaactacctcggtgattccgccggagcggaagaagcggcggatatcattgagaaagcgggaggcagagccgtcaccgtaaaagccgatgtatcctcagaagaagggattcaggcgctgtttaatgccgcgcaggagcatttcgggggcgtggacgtgatggtcaacaattccggctttaacggagcggaagcgatgccccatgaaatgagcctggaggattggcaaagggtcatcgacgtcaacgtgaccggcacctttttgggggcgaaagcggcactgaaacatatgctcgagcacggcaaaaaaggaacggtcttaaacatatcgagcgttcatcagcaaataccgcgtcctgaaaacgtgcagtactcggcatccaaaggcgggatcaaaatgatgacggaaacgatggcgctcaattacgcagacaaaggcatccgggtgaatgccatcgctcccggcacgatcgccacggagtccaataaggatctggaagatgaaacacataaacaggcccagctgaaaaaaattccgatgaacgccttcggaaaaccggaagaagtcgccgcggccgccgcatggatggtgtcggaagaagcgagttacgtaaccggaacgacacttttcgtagacggaggcatgacgctttatccgtcccagctggaaagataaaagaggaggggaaaccttctcttttttgtttagagaaggggcatacaggaaatggttctctaaaaaacaggagggccgcaagatggcgaatgactggtggaaagacgccgttgtctatcaaatctatccgcgaagcttccaagatacgaacagcgacggcataggcgacctgcggggattatcgcgcgtctcgattatataaaagagcttggcgccgatgtgatatggatctgcccgatttacccgtcgccaaacgtcgataacggctacgatgtgacggatcatcaagcgattatggaatcatacggaacgatggaggactttcacgatctgcttacagaatgccgcagccgcggattaaagcttgtgatggacttcgttttaaatcatacctccacggagcatccttggttcaaagaggcggaaatgaatccggacagcaaataccgcgattattatatttggcggccgggcaccgcggagggcccgccgaccgattgggtgtcggattacggacaatccgtctggcagtacgaagaacatacgggcgaatattacctgcatatgaacgccgttaaacaagccgatctgaattgggaaaatcccgaggttcggcaatcagtatacgagatgatgagattttggctcgataaaggcgtggacggattgcgaatagaccagcttcatcttctgtcaaaaaaagaatacttgccgccatatgaagattacatcgcccgccgggcagatccgaagcctttccggccaaacggagcacggatacatgattacttaaaagaaatgacgaaagaggtattttccaaaatatgacgtgatgtcggtcggcgaggccggatcagtgacgcctgaggaggggctggtttacacgggaaccgatgagcatgaactgaatatgatttttcattttcagcatatggagcttgatcaaaagccgggccaagagcattgggatgtaaaaccgcttgagctgtccgatttgaagaaagtgctcacagactggcaggaaaaactggaacatcaaggctggaatacgctgtattggtgcaatcatgaccagccccggatcgtatcccgcttcggagacgaaggcaaataccgaaaggcatccgccaaaatgcttgccgccctgctttatttcatgaaaggcacgccgtacatttatcagggagaagaactcggcatgacaaacgccccgtttgacagaatagaggactatcaagatattcagaccgtcaatatgtatcacaaaagggtatttgaaatgggccgcaacagggaagaagtcatggcgtccattatggcgaaaagccgcgatcatgcccgtacaccgatgcagtgggacggcagcaagaatgccggatttacggagggcgaaccgtggctgaaggtcaatcccaattacaaaaccgtcaatgcggccgaggctcaggatgatcccaattctatattgaacttttacaaaaaactgatccgcctgcgaaaacagtatgctgatatcataaaaggcagctacacgctgctgtttcccgatgacccgcagctgtttgtgtatgaaagacaggcaaacggacaaaaaatcatatccatcagcaacgtatcgaaagaagaagccgccttttattggccggacggctccgaatctgaaagggccgagctgcttctcagcaactatgaaaataacggcggagcggaatcccgcatcacgttccgcccttacgaaacaagagtttatctgcatgcctgatatgtgatacgacgccccgtccatacatggcgggggctttttaggtaaatcggttatcaatttagaaaaaaattacttgcaaaacgtaattacttcgttttattatggtataggtaacaaatgaacgagaaagtacgctttggaaatcgtcatcattctgatttacagaacagggggaaacggcttgtttaaaaaatggagcggaatcattgtcattgcggcatgctttttaatcgcggcgggctgcggcaattcatcttcaaaaggttcgtcaggttcttcgaaaagcggcaaactgcacgtcgtgacgaccttttatcctatgtacgaattcacgaaacaaattgtcaaagacaaaggcgatgtagacattctcatcccgtcttcggtcgaaccccatgattgggagccgacgccgaaggatatcgccggcattcaaaacgccgatcttttcgtatacaacagcgaatatatggagacatgggttccttcagcggaaaaaagcatgagctctgatcatgcgaagtttgtaaaggcgtcgaaaggaattgacttgctcgaaggttcggatgaagaggaagaggaacatggacacggcggtcatgaccacagccacagcatggaccctcacgtgtggctcagcccggttcttgcgcaaaaagaggtcaaaaccattacggcgcagatcgtaaaacaggacccgaagaataaagcatactatgagaaaaatagtaaagaatatattgcaaaactgcaggatcttgataaactataccgtacaacattaaataaagcgtcgaaaaaagaattgatcacacagcacgcggcattcagctatctcgccaaagaatacggcttaaaacaagtcgcgattgcaggcctttctcctgaagaagagccgagtgcggccaaactggcggatctcaaaacgtttgccaaaaagcatgatgtgaagatcatctattttgaagaagttgcatcgcctaaagttgcagatacacttgccggtgaaatcggcgcgaaaacggaagtgctcaatacactggaaggtttaagccaaaaagaacgggataaaggcatcggttatatcgacattatggagaaaaaccttgatgcactgaaagattcgctattggttaaataacatagtgtgcgccgcggggtgcacactatttctatgcgggaaaggaaggtcagcatgaatctcgttacattacaggatatcgtttttggttattcgcatacacccgtgcttgacggtgtgtcgctggaaatcaaaagcggcgaattcgtcggcattacaggaccgaacggcgcgtcaaaatcgacgctgatgaaagtcatgctcggcatgctcagaccttgggaaggaacggccgagatcagtaaaaaaaacgctgccggaaaacgcctgacaatcggctatgttccgcagcagatttcttcatttaacgcaggattcccaagcacagttctggagcttgtgcaatcaggccgttatacgaaaggaaaatggtttaaacgattgaacgaaacggatcaccacgaggtggaaaacgcgctgaagatggtggaaatgtgggatttccgccaccggaaaatcggcgatttatccggcggacagaagcagaaaatctgcattgcgagaatgcttgcaagcaatccggatctgctgatgcttgatgaaccgacaaccgcggttgactatgaaagcagacagggtttctacgaatttatgcatcatcaggtgaaaaatcacaaccgcaccgtcgtcatggtgacacacgaacaaaatgaagtacagcagtatttggataaagtcatacggcttgagaggggggaaaaaggcggatggaaatgtttgacttggaattcatgcgacgagcttttctagcgggaagcatgatcggaattatggcgccgatattaggcgtatatctcgtgctgagaagacaggcgctgatggcggatacgctgtctcatatttcattgtcgggcgtggccatcggtttttttctcagtaccaatattacggcggcgagcatcgttgtcgtcacgatcggagcgatcggcatcgaatatatgcggcgggcataccgtacatattcagaggtatccatcgcaatcttaatggcggccgggctgtcgtttgcgatgtttctgatcagcctgtcaaaaggcggcgcgtcgatgagcatcgatcaatatttatttggatcgcttgtcacggtcagccagcagcaggtctatattatcggaggcattaccctgctgattctgctttatttcattatattaaacagaccgctctatctgcttacctttgacgaggcgacggcgaagacatcaggcattaacacaaatctcctgtcaatgtcattcagcatcgtgacggggctggcgatttcggtcattattccgattatcggcgtgctgcttgtttccgcgctcctcgtactgcccgcggcttttgcaatccgtatcgccaaagggtttaaatgggtgtttgcggcggccattattatttctcttttcagtgtgttcatggggctgacgtcttcgtaccagctcggaacgcctccggggccgtcaatcactttactgttaatcattctgcttctgctcggctttatgctgcaggggatttggaatgcgtttaaaaaaggaaaagaacgaaaaaaccgccgttaagcggtgcagcagtctcatctgctgcgccgtttgacggctttttttacagaaatatatcagcaagacgctcatatgactctttttttgcttcgaaatcaaagacgttgcacagcaccatcatctcttttgtctgataacgttcggaaagttcaagcagacggcgtttcactgcggcagcagagccgatcaccatccgcttcctattttctgcaatctgtttacggtcctccggcgaatacggataagccttcgcttcttccacactcggcacgcggctgtcggcgccttttccgacacgaagaagccataaatcctggcttaaggcgagttcttccgctttctcatccgtagctgcgcatatgacgaaaatggcacagagtgaggccggagcggaaaaatgggaggaggcccggaaatggtcccgatagatctgaaaggcttttaccccgcgttccggattaatgaaatggccgaagacatagcccgcaccttgaagagcggcgcgtctggcgctgttttccccgaggcccagcacccaaagctgcggggctgtttcaatcaaaggcgctgtttttattccggcataagcatggtccgagggaaccgaatctgtcagaaaggatgataaatcctgaagctgcctgttgaactcggtcatacttttctttaccccgtctgtgagggcgagccggattttcgtcgtgccgcccggtgagcgtccgaccccaaggtcaatccggttcggatgcagcgcctcaagctgacggaaagtttccgcgactttataggggctgtactgcggcagcagcacgccgcctgatccgacacggatggacgttgtggctgcggcggtatgagcgatcataatttccggcgaaacgcttgcgagccctcttgtgccgtgatgctcggcaaaccagtaccgcttatagccccatccttcgctgaggcgggcgagctccgctgaacggcggagcgtctcgtgcggcccgtttcctttggatacgggcgcctgatcaagtatgcttaaatcaatcactcgtctgcccctttcctgacatgtattgatacaaggataggaaaaatgttcagtccccgtcaatttctttgttttctctattctctccggaacgaaggagaatataggaagtaatttttcgccgtttttcgccaaaaattcttatgttttatgaaactttgatataataaaagacgtataacttaataaacaccgggattcttgtcccggaatttagtaaaaatgcgcacttgcggcgtgcttagcggcacccttacagaataggagtgaatcatatggcgatctctttacaaaaaggacagcggattgatttaacaaaaggaaaagccggcctgtcaaaactgctggtcggactcggctgggaccctgtatcatccggcggctttttcggaaagctgttcggcggaggcggtgccaatatcgactgtgacgcttccgtactgatgcttgaaaatgataaaatgacagacagcaaaaacgtcatctatttcggcaatctgaaaagccggtgcggcggtgtcgtacatacgggtgacaacctgacgggtgaaggcgacggtgatgatgaacaaattctcatcgatttgtcgaaagtgcccgctcagattaataaacttgtgtttgtcgtcaatatttacgactgcgtcagacgaaaacaggacttcggcatgattcaaaacgcgttcatccgcgtcgttgatcaggctaatcgcgaagaactggtgacttacaatttaagagataactattcaggcagaacgagcctgatcgcggctgaaatctaccgcgaggacggcgagtggaaattcgccgcagtaggagaaggcacaaacgatacaaaaatcggcgatatcgttaaccgatacgcctaaacgataaaaaggagagtgcacacatggcaatttcattggcaaaaggacaaaaagtagatttgactaaaacaaatccgggtctttctaaagtcgttgtcggccttggctgggatacaaacaaatacgatggcggacatgattttgatttagattccagcgtctttctattaaatgaagcaggaagatgcgcgtcgcccgatgattttattttctataatcagcttgaaggcggaaacggctctgtcgcacattcaggcgacaaccttacaggccagggcgagggcgatgacgaaagtgtaagggtcaacctgagcgcggtgcctgccgctattgacaaaatttcattcgtcatcacgattcatgaagcggaagcgcgcggccaaaacttcggacaagtttccaacgcgttcgttcgcattgtcaatgaagagacaaatgaagagctgatccgctacgatctggctgaagatttctcaattgaaacagccattatcgcaggggagctttacagacataacggcgaatggaaattttccgcgatcggctcaggctatcaaggcggactggcccgtattgcgacagattacggcctgcaaatcggctaaaaccatatcaagcacagaagggagagacggcacatggctattcaattggcgaaaggacagcgtgttgatctgacaaaaacgaaccccggtcttacaaaagcggtgatcggcttaggctgggatacgaacaagtactccggagggcatgactttgaccttgacgcgtcggcttttcttgtcgatgcccatgacaactgtgttaatgatcttgattttgttttctacaataacctggaacacccgagcggcggcgtcatccatacgggagacaaccggacgggcgagggagagggagacgatgaacaaattatcgtcgatttctcaaaaatacccgcaaatattgaaaagatcggcatcaccgtcacgattcatgatgcggaagcgcgcggccaaaatttcggacaagtttcgaacgcgttcgtgcgcgtcgtcgatgaaaacagccagaatgaactgcttcgtttcgatttaggggaagacttctcgattgaaacggcggttgtcgtttgtgagctttaccgccatggggctgaatggaagtttaacgccatcggcagcgggttttccggcggtctggcatcactttgccggaattacggcttgcaggtgtaagcaggaaattaccgttttactaaataggaggaaaaaacttggattttctacatcatattatgtcgacctacgcttccttttttgattggaaaatgtggggtgaggtgctgactgaccctgtatcatgggggctgatcggttccttggttctgctggaagggctgctgtcggccgacaatgcgttagtgcttgcggttatggtaaggcatctgcctgaaaaacagcggaagaaagcattaacatacggattgttcggggcatatattttccgctttatctttatcggaatcgggatgctgctcattaagttctggtggatcaaagtgcttggcgcgctgtacctggcttggctcgtcattaagcatttctggatcggagaaggtgatgacgatacggaaggcatgaagaaaaattcatggatggtccgtacgttcggaattttctgggccactgtcgtttcagttgagttaatggatctggccttctctgttgacagcattttagccgcgtttgcggtatcggaaaaagtgtgggtgctcttgatcggcggtatgctcggcattctcatgatgcgtacagtcgcaaaagtattccttgtgttaattgataaaatccctgagcttgaaaacacggctttcgtgctgatcgggattatcgccgtgaaaatggcggcgagcgcttttgattatgaaatgccgcacgtggtgttcttcggaatcatcatcgctgcatttgtggtcacgtttattatccactatttcaacaaacaaaagcaggttcaggagcagacggctgcatctaaagaagaataaaacaaaaaaggagggagagttcatttccttccttttttgtaccgattatcatgaagagaaaggaggaaaatgatgaagcaggaagaattggtgatccgaaaggccgagccggaaaacgatgactgggaaacgtttctgatgcggccgctgccggaacgtcccggttacgagcgggaaaacgggctggcgtttacccggcttgccggccggattttgggcactccttatgatgagacggagtattacagtaagcttttcgagctgtcttctcatgaaaacatccatgtgttgagcgagacgctggataagaccatcgcgccggaaacgtttcaggcgctgcagcacattcattcggtcaatcaaaaagagaaagggctttcggtttccaggtttgtcgcgtttctcgatgggggcaggctgcttgccaaacacgctgatccgcttatgcaccgccggctgaggaccgcgtttatgacgcttttggaaacctttgcggaccggcatgaaaacgggctgaatcatcccgatttccggcgtgtgctcttggatgtgtcaaagttttcgctgaaccacctgaatccatggctcgaacaagccgatatagagtgtgagatgccgaaggtggtgtggtatggagacgcgaccaaaagccagctctattttctctattatctcatgctgatcggctgtgatgtcctattgtttcatccggctgcggaagatccgttcagcttgattgatccggatgaggagctcagctttgtgataaagctccccgcaacaggcggtcttgagccttttccgaaagaaaagccggacagaacgtccacgacggcctaccggtcaacgaaagaaattgagcatgtgctgaaccatgaggaatccatgatgtataagccttggcagttcagggagcacaccccgcagtccgtgaccttaaaaacgacgtatgatgagttatttctcattgcgaaggagcgggcgtttatccggccgcaatttaaagcggacagggagcgggtggccgttccgaacctttttgcgaaagtgatgggggtttccaaagatacgaaagaatattggaacagactccataccgccgcggactatcaggagacacacatgatccgcagttttccgtttacggaagagctgaaagccaactaccagtatcactacagtcaggttttaaatgaaaaaggagagattgacgcggacaggctgaaaagaagcaacatctggcagtacaagcatctgccttcaggtgtgcagagcgccatcgccaatgtgatttctgacatgtgcagaaacccagggctgaaggctttgcccggggagcagtcaagggatgccgcaatctatttgttccgccaggcgacgaatctgcccgcttcgctgctgcaattgattcagacgtttgattacgcccaaaccgttccgaaactcgttttatatcatacggaacaaaatggcgaactcacacgttctgatgccgccgctcttttgtttttaaataaattcggcgtcgatatcatcttgtataatccgccgggccatcaggacattgagcattatattgaagaaagccaatttgatgtccattggctggaggacatggtgtttcggcaggaatataaggagccgtcactcgtaagaaagctgtttagaaccattacgcaaaagcagggagagtaaataaatatgacagaaaatcaaaatccgcttgttcttgataaaaatgaagagatttctgaacaaaaagcagatgacatcagggcgcagctgcgccaagaccctgaggtgcagcgcatttcgcagcagattgacgtgaaaaaccaaatggagctgcttgagtacggaaaagaaccggcagttgaaatctcgaagttctccgaccgcatcttaaatatgatgaaaacaacaagtgtcacggattcaggcacaatgctgacgcagctcggaaaaatcatggaccgtttcgacaaaaatgatttcgatgaaccaaaaggatttctcgctaaaatgttcaaacgcggcaacagcatgattgaaaagatttttcaaaagtaccgcaccctgggcggagaaattgaaaaaatccacgtcgaaatttcaaaatacaaagatgaaatggcaaagacgaaccatacgcttgaagagatgtatgaaaacaacattaactactacatggagcttgaaaaatatgttgtcgccgggcagatgaagcttgaggaaatgcaggcgctcattccttcttatgaagaaaaagcggccggcggaaaccagcttgcgcaaatgcagcttgatacgctgcgtgacgggcttcaggcgcttgaggaacgtgtctatgatttagatatggcgcggatggtggcgctgcagacagcgccgcagatccgcctccttcagcgcggaaatacgaagctcatcggaaaaatcaattccgctttcgtcattacgattccgattttcaaaaacggcatcattcaggctgtcacagtcaaacggcaaaagcttgtggctgattcaatgagcgagctggaccgccgcacgaatgaaatgctgaagcgcaacgctgaaaatatttcaaaccaaagcgtggagattgcccgtatggcaggccgtccgagcattgacattgagacgattgaaacgtcttggaatacgattgtcagcggtatgcaggaaacgaaacagatcgaggaagagaacagacgtatcagagaagacggagcgaaacggattcaacagcttcaggataatattaaaaacgcagtcttaaagaattaatctgcaccccgcttgcttacggcaagcgggtttttttgcgaaaaaagataatgacaatgtgtaaagacaggtgtaaacttatacggtaatcattttcgatttgaggtgctgcttatgaacaaacaacctgccgtcactccgcgaaaacttctggcgattgccggaatgggctggctgtttgatgcgatggatgtcggaattttatcgtttattatcgccgcgcttcacactgattggaatttaacacccgatcaaatgaaatggatcggaagcgtcaattccatcggtatggcagcgggcgcctttttattcggaatgctggccgacaggatcggccggaaaaaagtgtttatgatcacgctgttattcttttctgtcggaagcggcatatccgcttttgcaacgggattgacggtttttctcatattgcgttttctgatcggaatggggcttggcggggaactgcctgtcgcctcgacgctcgtgtcagaagcgtccgctcccgaaaagcggggacggatcatcgtgctgcttgagagcttttgggcagcgggctggcttcttgcggcggtgatttcctactttgtcataccgtcattcggctggcaggccgcactgctcttaacggcgctggccgcgttttatgcgctgtacttgcggaaaagccttccggaatcaccggcgcatcaggcattgacgcagaaaaaaagcatacgcgggcaggcgggaagtgtctggacgaaaccgtatatccggccgacggtgctgctgtctgtcgtttggttctgcgtcgtcttttcttattacggcatgtttttatggctgccgagcgtgatgctgatgaaaggctacagcatgattgagagcttcgaatacgtccttctgatgacgcttgcccagcttcccggatatttctcagcggcgtggctgatcgaaaaagcggggcggaagaccatcttagtcatctatttgctcggaacggcgggcagcgcttatttcttcggtgccgcggattcattggccatgctgctcacggccggcatgctgctgtcctttttcaatctcggcgcatggggcgtgctttacgcctatacaccggagcagtaccctgcggcgatccgcgcgaccggttccggaacaaccgcggccgtcggcagaatcggcggcattttcggtccgcttctcgtcggatcgcttgcagcacggaacgtttcgtttacagctattttcgctgtcttttgtgcggccatcctgattgccgtcatcaccattattattctcggaaaagaaacgaaacagacagagcttgcgcaatgagcacccttttggggtgctttttttagtgagctgtctgttggcagacctatatttttccttaaaatcccttattttcaggaggcgaaaacttctttttccgggacaatgtcgcaaaaaaattcttgtatttgtaaaaaaaggataggaaatcagtttgcagcacattcgatggaaacgttctcaagcctgataaaagcccgatttcctttataatttatcctcaataaggaggattagagagtatttagaagcataccagaggaaaataagacacagggatgtttttaaagtaatgatacaaaataaacgggattatgatgtttgtttgacttattacaaacgtgttacggtattaaagattgcttattatggagggaaaatatgaatttggatgagaaaccaattaagataaaagtcgaaaatgtatctaaggttttcggaaaacagacaaaaaaagccattcagatgctgtccagcggaaaaaacaaaaaagagatcctgaaagcgaccggatcaaccgttggtgtcaatcaagcaaactttgatgtatatgatggggagatatttgtcatcatgggtctatcggggagcggtaaatcaactttagttcggctgttaaaccggcttattgaaccgactgccgggaatatttatattgatggtgacatgataacaaatatgtcaaaagaccagctccgggaagtgcgccggaaaaaaatcagcatggtctttcaaaaatttgcgctgtttccgcacagaacgattcttgaaaatacggaatacgggttggaactccaaggcgtcgacaaaaaagagcgtgagcaaaaagcgcttgattcgcttaaacttgtcggtcttgaaggctttgaacaccaattcccagatcagctcagcggaggaatgcagcagcgtgtcggacttgcccgcgcattgacgaatgatcctgacattcttctgatggatgaagctttcagtgcgcttgatccgctgatccgcaaagacatgcaggatgagcttttagaccttcatgactctgtcggcaagacgatcatcttcatcacgcatgatcttgatgaagcattgcgcatcggcgacagaatcgtgctgatgaaagacggtaacatcgttcagatcgggacgcctgaagaaattctgatgagcccgtccaatgaatacgttgagaaattcgttgaggacgttgacttatccaaagttctgacagcgggccacatcatgaagcgcgctgaaaccgtgcggattgacaaagggcctcgtgtagcgctgcagctcatgaagaatctcggtatttcttctatttacgccgttgataaacagaaacagcttctcggcgtcattcacgcggcggatgcgaaaaaagcggtggaatccgacttatcgcttcaggatattttaaatactgaatttacgactgtgcatgaaagcacatacttgacggaaattttcgatgtcgtgtctgatgcgaatattccgatcgccgtcacggacgataaggaccgcatgaaaggcattgtcgtaaaaggcgcattaatcggcgcgctttcaggaaataacgattatataaatgttgaagattctgctgaacaagctcaggattcttctgttcagggggtgaagtaaatggacagattgcctagaattccgttagcagatatcgttgaccggtttgttgactggcttaccatgacgttcggaggtttctttgacggaatctcaaacggtttggccgctttcgtaaacgcgattgtgagcggtttgggtttcatcccgtctattttattgactgttatttttgcagctctcgcttggtggatcagtacgagaggaattgcactctttacgttaatcggattccttgttattgattatttgggttattggtcgccgatgctgcaaacgttggcgcttgtcgtcacatctgttttgatttccattattatcggggttccgatcggcatatgggcgtctcagaaagaaacagtccgccgcattgtcacaccgattctggatttaatgcagaccatgccggctttcgtatacctgctgcctgcaattttcttctttaatatcggggttgtgccaggcgttgtggcatctgttattttcgcgatgcctccgacgatccgcatgacagttctcggtattaaacaggttccggctgatctgattgaagcgacggaagcattcggttcaacgacgtctcagcgtctgttcaaggtgcagcttccgcttgccacaaaaacaattcttgccggtattaaccaaagcatcatgcttgctttgtcaatggtcgttatcgcggccatggtcggtgcgccgggcctcggttctgaagtatacagcgccgtgacacagttgaaaaccggtgtcggagtggaagcgggtatcgcgatcgttatcgtagcgattacactcgaccgtatcacgcaaaacattaaagtgaagaagaagagcagggggaatgcctgatgcttaagaaaatcatcggtgtcggcgttaccgctgcgctggctctttctttggctgcctgcggttcgcagactgatgataaggcaacggctgcggaccaggtgaacaaaaccattatcggtatcgatccgggatcggggatcatggccctgacggatgaggccgtgaaggattacggattgaaagactggaatgtcatcacggcgtcaagtgccgccatgacggcgacattgaagaaatcatatgaccggaaaaagccgatcatcgtaacgggctggacgccgcactggatgttctccagatacaagctgaagttccttgatgatccgaaaaaaacgtacggaactgccgagcagattcatacgattacaagaaccggcttcagtaaggaacagcctaacgcggccaaagttctcagccagttcaaatggacgcaggacgatatgggagaagtcatgattgccgttgaggaaggcgaaaagccggccaaagccgcagctgaatatgtgaaaaaacataaagaccaagtggctcaatggacaaaaggcgcccataaagtcaaaggggataaaatcaacctggcttatgtggcatgggacagtgaaatcgcaagtacgaatgtaatcggaaaagtatttcaagacctcggctatgacgtgaagctgacgcaagtggaggcaggaccgatgtggactgcgattgcgacaggcagcgcggatgcgtcattgtctgcttggcttccgaatacccataaggcatatgcgtctaaatataaaggcaaatatgaagatgtaggaacgagtctgacaggcgtcaagatgggtctggtcgttcctcagtacatgaaaaacgtcaattcaattgaagatctgaagaagtaatgaagaaaagcagccctgtaacgggctgcttttttttatgcttcaaacgatttgaggacggcggccgttaatatctcagcgccagtaaagatggcgcttcggtcaaatgtcatttggggatggtgaagtccaggctccagaccgcatcctaggccgagcatcgtcgttttcaagttcggcacctttaacccgtaaaagtgaaaatcctctcctccggttgtcacaagaggttcatccacatgttcttctccgagaatgctgctgatcgcagatgtcatgatggcttccgcctccttgtttcgctcggctgccgggaggctgtgttctttttgcagttcgatttttgcgccgaatgcggcagccgccgcctcacaggctctttcggtttcggcggttaatttctccatggcggcattggtttgtgcgcggagatcaaggctgaacgatgcttttcccggaatgatattggaactttctccgcctgcctgaagctttgtcatcttcacggaatgcgggatgccgggatcaagatgaatgaagctgagtttttggacgagaagagcggcgatttcgatactgttaagcccgagatgcggtctcgcgccgtgggcttcttctccgataatcaggccttctatatgccggcttgagccatgcagaatggacggtgcgcatcggccgtttgccgtttcctgtacggggcgcacgtgcacgccgtataagaagtcaacatcatccagtacgcctttttcaatcattttcagcgctccgccgcctttttcttcagccggctgaaaaataaagcggatggtgcccttcggaagcttcggctgactctttaaaagcatcatcgtgccgagcgccatcgtcatatgtgaatcatgtccgcatgaatggttcgcctgaaagacaccgtccacttcctgccacagcgcgtcaatatccgcccggacagccacaacgggcgagccttctccgatttcgccgacaacaccggtgcaatcatcaaacgtacggattcggcagccggcctctttcagtttttcagtcagatattcagttgtttgatattctttccagcttacttcgggattggcgtgcaggtggtcaaaaatgtccataatgacttgcttttcatgctctgtgagtctgttcatgccgtaagtcctccttcaaaagctgtctgttttttatttttgatattgaaaacaggcaatcggtctgtatataatatagcacatatctgtattttctgaatagtttataaattcaaagcgggatggtgatgttatggctgtgccgaaggccgaacctgtattgaaaaagaagaaattgtttgtgatgcctgatgcttatgtgctgctgttcattgtcgctttactatgcgcgatagcatcatacatcgttcctgcgggggaatttgacagggtgacaaagggcagtgtgacgtccgccgtcccgggaagttatcattctttagaccagtctcctgtcagcccgatcgctttttttaccgcgattcaggaagggatgacaagttccgcgccgattatttttttaatcctgtttacgggcggcaccattgcgattttggagaaaacgggcgccatcaatggattgatcagtaatgtcatcagtacgttccgcaccaaacagctgctgtttattgcaattgtcggatctctattttcgatcctcggcacaaccggcatcgtcgttaattccgtgatcggttttattccgatcggcctgatcgtcgcccgttcgctgaaatgggatgccgtggccggagcggccgtcatttatatcggctgttatgccgggtttaacgcgacgattttatcaccttcaccgctcgggttatcacaaagcatcgcggagctgccgctgttttccggcatcggcctgcggattgccgtctacatttgttttctgctatcatctattttatatatttatcggtatacgagaaggctcagaaaagcaaaggacgccagtctgctggggaacgattggtttccggcagcaggttcaatcccgcaggcttcagatccggaggacaagccagtcccgtttaccgtccgccataaattgattctggctgtcgcggctttgtcgcttgccggctttttatacggcgcgcttactcttgactggtctgattcagagatggccgccgtgttcatttttatctcaatcgtgtcaggcctgattgcgggaatggcggcaaatgatatcgcaaaaacgtttattacaggctgtcaggggctcgtttacggcgcgctgatcgtcggaatggcgagaagcatttccgttattctggaacacggaaagctgcttgatacggtagtcaatggacttgcgtcactgctgcacggtttcagcccgatggcaggcgcaatcggaatgtatatttccagcgccctgcttcattttctgatatcatcgggctcaggggaggcggtcgtatttattccgattttggcgccgcttgccgatctgatgggcatcacgagacaggtcgcggttgaagcggtcatgcttggggaaggcgtcgtaaactgtgtcaatccgacttccggcgttctgatggccgtactggctgccagcggcattccgtacgtaaagtggcttcgcttcatgattccgctggcgctgatttggtttgtcatcggccttgtgtttatctgcataggcgtcctgatcaattggggcccttattaacatttttgtcaatgatatttcggtttatcattatgaatcggcaagatataatgggagttgtaagccattcttaatagtacgggaggaagtcatgaatcagcgtcggaacagactttcaaacgtgaatggaaagagtgagagtgtgaaagagaaagaacgaatgatttggtcagaagtcggaatgcttgtgggcacactgtctttgcttgacatcatcgtacgcggacttgttctgaactgtccgtttagggaatgggccgggagcttggcggttttcttcattataattgtttattattgcatcagggcgggagcgtcgggaatgctcatgccgagaatagacaccaaagaagaactgaaaaagcgggtgaagcagcagcggatagattcaatagcagtcacttttgcggtggcggcgcttacgatgtacgacagggggtttccccatacattctttgcttggctgaaaatgatctttctttttatcgtctgcggaggcattctgtttctgcttcggtatgtcattgtgaagctgtcttacagaagagcgataaaagaaataaaaaagaaatcatcttgacaggtggtttctttttttgtttgaaagcgggaagtctttttaattgataggaatatagatttgaattcactctgccgcgttgctttgatagagagagtgtgataagttgaaatgtaagcgttaacagaattctccagtcttcacaacagttgaaaggagctgaagaaagagtaagaggaatttttgactccgcagtcagtcttcaaaaatgaaataaggagtgtcaaaaatgtttgaaaaacgattcaaaacctctttactgccgttattcgccggatttttattgctgtttcatttggttttgtcaggcccggcggctgcaaacgctgaaactgcaaacaaatcgaatgaggtggccgcgtcatcggtcaaaaacgggaccatccttcatgcctggaattggtcgttcaatacgttaacacaaaatatgaaagagattcgtgatgcgggctatgcagccattcagacgtctccgattaaccaagtaaaggaagggaaccaaggagataaaagcatgaggaactggtactggctgtatcagccgacatcgtaccaaatcggcaaccgttacttaggcactgaacaagaatttaaggacatgtgtgcagccgcggaaaaatatggcgtaaaagtcattgttgatgcggttatcaatcataccaccagcgattacgccgcgatttctgacgagattaagcgtattccaaactggacccatggaaacacacaaattaaaaattggtcggacaggtgggacgtcactcaaaattcattgcttgggctgtatgattggaatacacagaatactgaggtgcaaacctatctgaaacgtttcttggaaagagcattgaatgacggagcggacgggttccgctatgatgccgccaagcatatagagcttccggatgatgggaattacggcagccgattttggccgaatatcacaaatacatcggcggagttccaatacggagaaatcctgcaagacagcgcgtccagagatactgcttatgcgaattatatgaatgtgacggcttctaactatgggcattccatcagatccgctttaaagaaccgtaatctgagtgtgtcgaatatctcccattatgcatctgacgtgtctgcggacaagttggtcacatgggtggaatcacatgatacgtatgccaatgatgaggaagagtccacatggatgagtgatgacgatatccgtttaggctgggcagtgattggttcccgctcaggaagcacgcctcttttcttttccagacctgagggcggaggaaatggggtgcgatttcccggaaaaagtcaaataggagatcgcgggagcgccttatttaaagatcaggcgatcactgcggtcaatcaatttcacaatgtaatggccgggcagcctgaggaactctcgaatccgaatgggaacaatcaaatatttatgaatcagcgcggctcaaaaggcgttgtgctggctaatgcgggatcgtcttctgtcaccgtcaatacttcaacgaaattgcctgacggcaggtatgataatagggccggcgccggttcatttcaagtagcgaacggcaaactgacaggtacgatcaatgccagatccgcggctgttctttattctgatgatattggaaatgcgcctcatgtctttcttgagaattaccaaacgggggcagtccattctttcaatgatcagctgacggtcaccctgcgtgcaaatgcgaaaacagcaaaagccgtttaccaaatcaataatgggcagcagacagcatttaaggatggagaccgattaacgatcgggaaaggagatccaatcggcacgacatacaacatcaggttaaccggaacgaacggcgagggtgcagagagaactcaagaatacacgtttgtcaaaaaagaccaggcccaaaccaacatcattggctatcaaaatccggatcattggggccaggtaaatgcttatatttacaaacatgatggaggcagggccatagaattaaccggatcgtggccggggaaagcaatgactaagaatgcaaatggaatttacacgctgacgctgcctgcgaatgcggatacggccaatgccaaagtgatttttaacaatggcagcgcccaagtgcccgggcagaaccagcccggatttgattatgtgcagaatggtttgtataacaactccggtttaaacggttatcttccgcattaatggatagggctatcatcacatcagcgtgccggcaaaccctcgcttctgggaaaaggacagcacgtcttcaatcacgctgaaaagatacaacatcctaaaacggttccgttttaggatgttgtcaacaatctggaaaccatcatcgatattttttgtccaaaaatcaaacttttctcttgcaaaagtttgtgaagtgttgcacaatataaatgtgaaatacttcacaagttaaaaacagacaccacgaaacactggaggatgagcatacatgatgaacgaacgagtgaacaaagtagcattaatcggagcaggttttgttggaagcagttatgcatttgcgttaattaaccaagggatcacagatgagcttgtgatcattgatgtaaatagagaaaaagccatgggcgatgtcatggatttaaatcacggaaaggcatttgcacctcatccggtgaaaacgtcttacggaacatatgaagattgcaaggatgccgatatcgtatgcatctgtgccggagccaatcaaaaaccgggcgaaacgagacttgagctggtcgaaaaaaatctcgccatttttaaaagcattgtcggtgaagtaatggcaagcggatttgacggcatcttcctcgttgccacaaacccggtcgacattctcacttatgcgacatggacattcagcggtctgccgaaagaacgcgtcatcggcagcggcacgacactggattctgcgcgattccgttatatgctgagtgaatatttcggcgccgctccgcaaaacgtacacgcccacattatcggcgagcacggcgataccgagcttcctgtatggagtcacgccaatatcggcggagtgccggtgcagcaattgctggagaaaaatgcagcttacaaacaggacgagctggatcagatcgtggacgatgtgaaaaacgccgcctaccatattatcgagaaaaaaggcgcgacatattacggagtggcgatgagcctcgcccgcatcacaaaagcgattttgcgtaatgaaaacagtattttaaccgtcagcacatatctggacgggcaatacggtgtaaacgacgtctttatcggcattccggctgtcgtcaatcggaacggcatcgccggtgtgacggaacttgagctgaatgaaacagaacagcgtcaattcaaccatagcgcaaacgtgctgaaagacattctcgctccgcatttcgcggagtaaacaaaaaagcagtacatgacaaacgccatgtactgctttttttaattcgcttttttcgccatttcctgagaggtttttactctcgcttttcccataaacaaaatggtaacggccgcaatgacgatcggcgccagcgcaagcgtgaatacatatgtgatgctttgcgacatggcgtcaataatgcgatccagaatgtgcggcggaatatgggcgcgcgtgccggcctggaaaatctcctgcggatttccgatgttctgcatcgcgccgcccgctcctttcatgccgctgaatgaatctgtgagcttgttggtaaacacattcgtctggatggtcccgaaaatcgtcacaccgagcgtcataccgaatgatctcaaaaacgagtttgttgagttggcgcttccgcggtaacgcggctccagatcgttcatggacgcagccggcagcagtgagaagttgaagccgacgccgaatcctgagatcagcatgaataccgtcagcatcgtacgcgccgtatccggagtcatattggaaagcagcagcattccgataaagaaagcgaccacggaaatcagcatcaaattacggaaccgcactttcgtctggaaaattccgccgatcatacttccgataacagaaccgatcatcatcggtgtcaaaataaagcccgcgctcgtcgcggtgctgccgtacacagcctgaacgaaaatcgggataaataccgctaaaatcacaaatgtggctccgtaaaggaacgccagaatctgtgccgtggcaaataaacggtttttaaacatccaaaatgagataatcggttcttccgcttttctttccacgataaaaaaggcgataaagaacacggcgaacacagcgaacagaccgatgatctgaacggagttccaatcatacgtttttccgccgagctcaagagcgaacatcagaccgacaatggaaaccaccagcgtaatcgcgccggcccagtcgattttctgcttcttgtgttcaagggattctttataataacgaagaatgaaaaacaatgataaaataccgatcggcacgttgatataaaacacccagtgccagctgatggagtcggtaatgagcgcgcctaaaagcggcccgagaacgctggaaaggccgaaaacggcaccgaacatgcccgacatttttccgcgtttttccggcggaaataaatcaaaaatgatcgtgaaggcgatcggcatcagcgcacctccgccgattccctgaatgacgcggtaaataatgagctgatccattgtttgagcgattccgcataatgcagatccgattaagaaaagaataagaccgaataaaaagaaacgcttgcgtccgtacatatcggacagttttccgtaaatcggcataccggccataacggctaccatgtatgatgccgtcacccacgcgaacttatcgaaacttccgaggtccgccacgatatttcccatcgcagtggcaacgattgtattatccatagccgacattaaaatgcccagcaaaagaccgatgacgacaaacttcgtcgaggcgtccttcgcggctgtttgttccatgctttttcctcccatacttacttttgatcattaaatttgctatgatcatattagatttgccgaaaattatcttgatcgtcaagataaattgattttatagggaggcctgtcagttgtcaacaagaaataccagaagcgagacggaggaaaccgccatacagttattccggaagatggccacaaggacgatcctgtttcatcaggcggccgctcaatctctcggtctgtttccgaccgatttgaaatcagctgatatcttaaatgaagcaggcccgatgaccgcaggcgagctcgggaaaaaaaccggcctcagcacaggttcggtaacggcgctcattgaccggctcgaaaaagcgggatatgtcatgaggaaaaaagaccccgaagacaaacggcgggtgatcatcgtgccgctgacagccggaaaagcgaatgtgaagcaattattcagctccttatcccagtccacgatcagcctttgccggcaatataaagaagaagaactgcggctgatattcgattttttaggaaaagcgacggacatgatggaagacgagcttgagaaattaaaataatgtatcatagcacggcccattcatgaataacttgtacaagttgcatgaatgagggggaagccaatgaacatctttttaagctacatcgttctcgggctgtcattgtcagcacctgtcggcccggtcaatgcggcgcaaattgacaaaggcatcaaaaacggcttttggcatgcatggattttcggtctcggcgccatggccgcggacgggctgtatatgattttgatctatttcgggctgtctcaatttttgaccgctccttttgtaaaaacgtttttgtggctcttcggttttttcgtgctgacctacacgggagtcgaaacgttaaaaaatataagggaagccatgaatgtcagaagcggaaaaggaaaaccggctttttacaaaactttcggcgcggggttttttatttctctttccaatccgctgagcattttattctggctcggcatatacgggagcattctcgccaaaaccgctgaatccttcgatgcaaatcagcttttgatttacagctccggcattcttctcggcattttgatctgggatttctgcatggcggtcgctgcgagcactttcagaaatcttcttcatgaaacagcgcttcgctggctgacgggagcggcgggtgtgtctttgatcgttttcggattttatttcggctggcaggggattcaaatgctcatctcataaatagaaggactgtcacctatcgcctgtctccatcataacgtatcctgacgatactggaggtgggccgatggcaagcgggctgtacacaaaaagttgccttgaggaaaagttattggatctgccaaattggcagagaatcgcttttgagcttctatcagaaaaagtaggcgataaagcggatacgtttccgtgcattcccggacgtcagggatttttgacagatcagctccggatatcctttgcgggtgatccccgcgaagagggaaccccggaggaagtggggatgctgctgtccgagtacggaaagatctcaaggaataccggaaaatacgcgtcgctgcttgtgatttttgatacgcctgaggatttagctgagcattattccgttgaggcgtatgaagagctgttctggtcttttttaaaccggctgagcggctgcgacccgaaagactggccggaagacataccggaagaccctgaacattataaatgggagttctgctttgacggcgagccgtattttattctgtgcgcgacgcctgcgcatgaagcgagacaaagcagaagcttcccgttttttatgctggcgtttcagccgagatgggtttttgaaggattaaatgattcaaccgcgttcggacgaaacatgagccggctgatcagaaaacgcttagaggcgtatgatgaagcccctcttcatccccgattggggtggtacggaggaaaagacaatttagaatggaagcaatatttcctccgtgatgatgagacccaagtgtcaaagtgtcccttttcttatttgaagagactgtttaaaccgacgaaataagctatgatccggcagggctgtgtccctgctttttttgtacgatccatgtcacgatcgcaatgacggcgagaaaacaaaggctgaccagaaaaccgggccggctcgatttctcaaacagcgtcccggagacggccgcgacaatcagcacaagggcgataacaatctgtacggttcccatctttgtcgtttcaagcagtttcttgcccgagaacaaaatgaacagccacgtataaagaagcatgaggcccgccgcggttgtcatgtgttcatatatgtttttcggcagcaccaatgacaggatgatggagacgatgagtccggcaaacgtcaatccgagcgcgggccagcagatttttttgttttcctttaatctgaagcatttcggcgcatctccgtcatcagccattgtacaaagcaatgtcgtcaccgcaaacagcgaggcgacgagcgtggaaaatcccgcaataataaaaatcccgttaaaaatatcaagaatgatatctaaatgaaaacccttcagcgatgtaataaacgggctgtcctgttcggtgaatttgcccagcggcactaacagcagcgccaggccgagagaaatgacgtaaatcaccgcaagaacggcaagcatcagccggcctgattttgaggcttcctccggctttttcaaatgcacggtcatcagccccaagacttcaattcctccgaaggcgtaaaacgcataaatcaatcccgtccataaccccatcgctccgtgcgggaacaaatcctttgattcgttcggcacctgcacatccggtttatgagaaaatataccgcacagcgccaatatggcgatgacgataaacataacaatcgccgccgtcttgacaacagcgagcacattttccgttttttgaaaaacggacagccccgtaaatataatcaaaagaccgagcaccgcatagatggaggcgaaaatccacagcggcacattcggaaaccaatgcttcgtaaacagcgagatcgctgtcagctggcttcccgtgatcagcatctcggacgaccagtacacccatccgttgctgaaaccggcccaagtgccgaaagcctttctcgcataagcgcaaaaagaccccttttcgggctgtttggccgagagcttcgcgagctgctcaaagacaaaataggtgccaagcccggcaataagaaatgagatcagcgcggaatatccgcttttgacaatagcgatgctggacccgagaaaaaagcccgtcccgattgtgcagccgacaccgattaaggagagctgccaccaagcgagattccctttaggctggtcctgtgatttactcatgaagttcaacccctttatcaaagcttagattgcggccgtcagaaggggaatatacatccaataaattgctttacatgaaacaaacggccggggttcataatagaagaaaaaaaggagcagtctgatgacacagcaatttatcgtaccgccgaaaaaagggctcggcctgaaggttcacaaagggcagattataaaagtagtcgatgtggaagggcagcaggtggctgattttacggcgtatcatgccaaggacttttatgaacatcttgatcagggcgcgacgatcgatgccaaccagtccattcatgtaaaaacaggtgatcatatttattcaaatttatacaagccgatgctgacgctgattgaggatacagtcggcaagcacgacttgctgcttcccgcctgccgtccggatatgaacaggcttttatacggaaagcataaggacgagctccaggatacgtgctatgacaatatgagcggggcgcttgaaccgttcggggtgccgcggccgcatatgcattacccatttgccatctttatgaacacggtgctcgatgagaaggggaacttatcagtcgaaacccctctttctgacgcgggtgattatgtacggctccgtgcggaaatggatctcgtcgtcgcgttttcatcctgtccgatcgaaaaagggaaatgcaacggggacagcatcacggcgctgcgggtggaaatcagctgatcccggtgtatttggttcacttaaaaactgcacctgtgctatatttaacaaagagtcgtacatagtggcatgattcattttcagtatgaacgggaaatgaatcataaagaaacaatgcaggaggagtgattgggatgagcatccagaaacaaattatgaatgatcttcatgtaaaaccctcaattgatccgaaacaagaaattgaggacagagtgaactttctgaaacaatatttgaaaaaaacaggtgccaaaggctttgttctcggcatcagcggggggcaggattccacgcttgcgggacgcctcgcccaattggcggctgaaagcatcagagaagaaggcggaaacgctgaatttatcgccgtccgccttccgcacggcacacagcaagatgaggatgacgcccaattggcgctcaaattcattaaacctgataaatcatggacatttgatattaagtccgctgtcagcgcgttcgctgatcagtataaaaaagacacgggcgatcagctgtctgactttaacaaaggaaatgtaaaagccagaatgagaatgatcgctcaatatgccatcggcggacaagaggggctgcttgtcatcggaaccgaccatgcggccgaggcggtgaccggtttcttcacgaaatacggtgacggcggagctgatctgctgccgctgaccggattaacgaaacgccagggcagacgtttattagaagaactcggcgcgccggaacgcctgtatttgaaattaccgacggccgatctgctcgatgaaaaaccgcagcagacggatgagaccgagctcggcatcacatacaatgacattgatgattatttagaaggcaaggatgtttcttccgaagtgattgaagcgctggaaaaacgctacctcagtacggagcacaagcgccaggtgccggcatcgatgtttgatgattggtggaaatagaatgaaaaaaacctcccttttgaaagggaggttttttgtttatttcatttttatttatctacactttcataaatccctacccaataccctttgctgctgtcatagtatttgtatttaaaaatccatgttgtaccattcagttcgaaagaagcagcgaaaataccgttagggcttggaacgggcttgatggcattaatgccggcatctgctttcgttgagattgggctattttccacggatggggatgctgttggtgatgcggcaaaggcaggagcggcagacatcagtaaggcaagagacagcgcagaaccggttaacacttttttgaatttcatttcgaacactcccttttcaaatgaaatgtattacagtgttaataattagacgattatccatataattcctcctttatttctaaaatttttttcttaaattgaaaaaaacatcccttcggagggactttttatttattgatccatttgcatgggtcagggacatgttttcaaaacgcttttttatttgatacggatatgattcagcttcaccattaatttgtcggtaaatcttcgaaggctgcctctcgaatcaggctcaagaggcagatttgcttgggcagcgatcgtttctgcggcctgctgaatagacatttggtctgtatggagatgttctgcgaagaggctatcagacaggctgttgatacagcggtcgatttgttttgcggcccaggagttttttccttccgctctggtgcgcaggcgtttcagcaatgtttcctttgaagccagcagggtaaagtggtgaatggtccggccatcctgtctcagcctgctgataatgtcatggaagtattgatcgttcgtaatggtcatgggcacaatgatgatgccctgatatgtatctgacaaataggaaagcatgctgtaattgaattcccgccacagagggtagctttgaaagtcatcttcagcgatatccggcggtatcatcgaacgcatcgcaaaccccatcttttcaggatcatatacgtaagacggtttcagtcttctgtgcagttcaaacgctgtttgtgtttttccggaaccgaaagccccatttatccaaatgatcatcatgatatccccctttttctatatgatacaaaaaaaagacccttcgatcgaagagtcagcgggaaaaaacagacgtatattcccggagcgattcctttatatgcgtaaaggcatgttctccaaaatactcaagagaaacaaaaccgtcatattgtctgttcatcagctcttttaaaaatgctttttgatcgagatctccttggaaaatcggagttggcttgctgagataccagttgtcaaaattccagtgatagtttttcagatgaatatggctgacggtatgatacagcttttctaaagcggacatttggtcaacgtgattgacgtgtaggttggagccgtcaaaaatggtgcggacccgcggatgtccgacatcctccaaaaatgccagtgccgcctccggtgtatccgcgtacgtatcgtaatgaatctcaagcccgatatcgacttcatagtcatctgcgagccgtgccgcctgctgaaattgatcaaccgcacgttgccacttttccggtgacgtccgatgcgaaggaagattgccggcaaagactctgatcaaggggctgtgcagctgtcgtgccgcgcttaatgccccttgaacatcctttaacgcctgcctttcatcctgagcggcgaagtcagtgtacaaactgacggcaggcaccccgaggccttcctcctgaagctgctgatcaagcctgtcgagcgggccgatttcctctatatattgtttagcgtgtccgtaccacagttcgattccgtcaaaggagtgctccttcgcgaaagaaatgatgtcgaaaatatgcttttttttaaatcctgtcgtgcaaaaactcagtttcatcggtaatcctcccgtaactgtctatcatatgtgtacttttccccgggtgagatacggataaacaggtgaaaagggcagacacttttataagcggagtgtcagtgcggcgcacaaattgtttagcgcttttttgcgtcaaagtattaaataattgaccgaagtgttgtacaattaatttcattcgagtaaggggggagaagccattgaaaaatgaaacggagctgacggacttcagtcccgtccgcaataaaccgactcgcgctcgttatgtgatactgtttcttttgttttttatcactgcgattaattatatagaccgtgccagtgtatccatcgccgccccgtccattcagacatcgctgaacataagccccgcgcttttgggcgtcgtcttttccgcattcagctggacctatacgggtatgcagattcccggcgggctcattttggacaaattcgggtcaaaacggacgtacggcgtttctttaatgatctggtctgttttcaccggagtgcaggcttttgcagccagtttcggatttttattcggctgccgcctgattatcgggctggctgaatcgcctgcgtttccggcaaacaatcggattgtcacgacatggtttccaaggcgggaacgcgcctttgccacgggtgtttatacggcgggggaatatgtgggactggcgttcgccacaccggttttattctgggtgttaacggcatttgactggcgcgccgtctttatttcctcaggggtgctcgggcttgttttctccgttttctggttcaaaatgtatcacgagccgaatcggtaccggaaagtgaaccgggaagagcttgattatattagagaaggcggcggactgacagaggtgtctgaatcagccggcaggatcacgtggcgggatttcgtccagcttcttaaataccgcaagcttgtcggcttgtatatcggccaattcgccgtagcctccacgctgttcttctttttgacatggtttccgacttatctggcggaggcaaagcacatggcattcttaaaagtcggcttcgccgcatcaatcccgtatatcgccgcctttttcggcgtattgttcggcggatattggtctgacggaatgatgaaacggggcgtgtcggtgaacgttgcccggaaaacccccgtcatcctcggtcttctgctgacaggctccatcgtgctcgcgaatgttacggattctgctcctgcggttttgacgatcttatccattgcttcttttgcgcagggcatgtccaatatatcctggacgatgctgagtgaggtggcgccaagcgaaacaatcggattggcaggaggcgtgtttaactttttcgccaatatggccggcattatcaccccgcttatcatcgggtttatcgtttctgcgaccggttcatataacggagcgattctgtttgtcggcgctgtcgcatttatcggggcattttcttatattttcattgtcggaaaggtggaacgcattacgctccgatagaaagaaaaactcatctcttcttataaaggatgggttttcttttattgcattatctctatatttcaatattgggttatcatataataaacataactttttcatttcttaggaggatttcgccgaagatgaacgcaaaacgtgccattcccgtaagagaaagaaacatcgtactgatcggattcatgggtgtcggaaagacaacaatcggccagctggtcgctaagaaattatacagagacttcattgatattgatttgcagattgagaaagatttcaatatgtccatccctgaaatgtttgagaaaaaaggtgaagcctttttccgtcaaactgaaaaggactatatattagatatctgccgcaatacgaaattcaagatcgtgtcgcttgggggcggttcgtttaaacaagaggcaatcagacagtgctgcctcgaaaactgtctcgtgctccatcttgatttatcatgggagaattggaagcagcgggctgacctgctgattgaaagccgtcccgttctgcataaccgttccatggatgaaatgcagcagctctttaacgagcgccaaagcatctatgataaacataattcaaaagtggcgacggataatctggaaccagaagaaatcgccgattatatcgtagaaacgttaaaaatcggctgggatctgtatcagccgatgtaaaaagagccgtgacgctgtgagcgtacggcttttttgttttcttttaaacaaacgtttattaaaatgtttagaaaatgagtgtaaaatcgtgttaagatagagtcagaaaattaaatcttataaaacaaaggagaataatcggatatgcaattatacgacttgccgctcgaccaactgcaaacctataaaccaaataaaaccgctcctcatgacttttcggatttttgggcatcatcattacatgagcttgcaaaggaagaggcaaagcctgaattgacggctgaaagctacccggctgacggcgtgaaagtattccggctgacataccgaagcttcggcaaggcggaaattgagggatggtacgccgttcccgaccggcaaggaccgcatccggccatcgtgaaatatcacggctacaacgcgagttatgacggagatatacatgacatcgtaaattgggcgcttcacggatatgccgcgttcggcatgcttgtccgcggccagcacagcagcacagatacaagcgtctcaccgcacggacacgttcccggctggatgacgaaagggattttagataaagatacatattattaccgcggcgtgtacttagacgccgtccgggctttggaagtcatcagcggctttgatgaagtggatgagacgagaatcgccgtcatcggggggagccagggaggcggactttcaatcgccgcggcggcactatctgacattccgagagcggttgcggccgattatccttatttaagcaattttgagcgggccattgatgtcgctcttgatgagccgtatcttgagattaactcttttttcagaaagaacggcagccctgagacggagaaggccgcgatgaatacactggcctattttgatatcatgaatctggcggaccgcgtaaaagttccggtgctcatgtctatcgggctgattgaccgcgtgactccgccgtcgacggtgtttgccgcttacaatcatctggaaacggaaaaagaattgaaggtttaccggtatttcggacatgaatacataccttctttccataaggaaaagctggcctttctgaaagcgcatctgaaaggctgacgacagcgaaaagcccaagtacttgggcttttttcaggaatgatcacggaaaaggacggatacagatggaacaaaggatcatcgaagaattaaaacgaattgaagcacagcacggcgtcaaggtgctttacgccgtagaatcagggagccgcgcatggggatttccgtcaagcgacagcgactacgatgtgcggtttctctatgtgccgaaaaaagaatggtacttttcgatcgaaccgcatagggatgtcatagaagagccgattcatgacatgcttgacatcagcggctgggaactgagaaaagcgctgcggctttttaaaaaatcaaatccgcctcttttggaatggctctcttctgagatgatctattatgaagctttctcagcggctgaaaagcttcgaaaactgaaaatccgcgccttttcgcctgaagccggcatttatcattatctcaatatggcaaaacggaatgaaaaaacggaattgcagggcagtgaagtgaagattaaaaagtatttttatgttttgcgtcctctccttgcctgcagatggattgaaacgttcggctccgtaccgccgatgtcatttcccgtactggccgatgccttattgacggatgaagcgctcatttctgaaatcaatacactgcttacaaggaaaaaaagcggtcaggagctggctccggaaccgagaaatatgatcattcacgcgtttatagaagaagaaatagaacgcatcgggcactatgtcaaaacgatcaaaacaccgaaacctgacataacggaggaactgaatcagctattgattcagaccgtcgaagaggcgtggggggaaaaaggcggaaattgacgattgccgtcatttccgtccgccttttttcggcataatccgcctgctatctaagaagctgattgtggtaaaaccacaaaaatttatcagaatctttgtatttttagaatattgtgagaggatgttttgtccatttacaatagactcatacaaatacttcttagattgcggggtgttaaggttggaagtgattacaagagattttttcttatttttatccaagagcagctttctcaataagatggcgcgaagctggggaagccgtgtggcagccggcaaaatcatcggaggaatggatttccgcagttctatcccgacaatccgacatttgaacagccaggggctgtcagttactgtcgatcatttgggggaatttgtcaacaacggtgacgttgcgaaagaacgcaccgaggagtgcatgcagaccatcgccttaattgctgatgaacagctgaattcccaagtgtcattaaaaatgacgtctttaggtcttgatatagatcttgatctcgtctatgaaaatatgacgaaaatcctccagacggctgaaaaacataaagtcatggtgacgattgacatggaagatgaaacgagatgccagaaaacgctggatatctttaaagacttccggagccggtatgaatatgtaagcaccgtggtgcaggcttatctgtacagaacggagaaggatcttgatgacctcagcccgctgaatccgtttctgcggcttgtcaaaggggcctataaagaatcggaaaaggtggcctatcctgaaaaaagcgacgtcgatgaaaattataaaagactcatccgcaaacagcttttaaaaggacattatacggcagttgccacgcatgatgacaaaatgatcgagtttacaaaacagcttgccgaagagcacggcattccaaacgaccgttttgagtttcagatgctgtacggcatgcgctcgcaaacccagctcagcctggtggaagaaggataccgtatgagagtctacctgccttacggggatgactggtacggctatttcatgagacggctcgccgagcgcccctcaaacatcgcattcgcctttaaaggaatgactaagaagtaaaaaagggagagatgacaatgactacaccttataaacacgaaccattcacgaatttccaagatcaatcgaacgttgaagaatttaagaaagcgcttgcgacggtaaatgagtatctgggaaaagattatccgctcgtcatcaacggtgaaaaggtagagacggaagcgaaaatcgtatccattaaccctgcagacaaagaagaagtcgtcggaaaagtgtcaaaggcgtcccaggagcacgctgagcaggcgattgaagcggctgcgaaagcgttcgaagagtggagatacacatcccctgaagaaagagctgccgttttgttccgcgcggctgccaaagtccgccgcagaaagcacgaattctccgccctgctcgtcaaggaagccggaaagccttggaatgaagctgatgcggatacggcggaagccatcgactttatggaatactacgcgcgccagatggttgaattggcaaaaggcaagccggtcaacagccgcgaaggcgagaagaaccaatatgtctacacaccgaccggcgtaacggtcgtcattccgccatggaacttcctctttgcgattatggcgggaacgacggtggcaccgatcgtaacgggcaacacggtcgttcttaaaccggcaagcgcgacaccggtcatcgcggcgaagttcgtagaagtgcttgaggaatcaggtcttccgaagggcgttgtcaactttgtgccgggaagcggagcggaagtgggagactatctcgtcgatcacccgaaaacaagcatcattacgtttacgggatcacgtgaagtcggtacgagaattttcgaacgcgcggcgaaagtgcagccgggccagcagcacttaaagcgtgttatcgctgaaatgggcggtaaagatacggttgttgtcgatgaggacgcggacattgaattggcggctcaatccatctttacatcagcattcggcttcgctggacaaaaatgttctgcaggttcacgtgcagttgtccatgaaaaagtgtatgatcaagtattagagcgcgtcatcgaaatcactgaatcaaaagtgacggcaagccctgacagcgctgacgtgtatatgggacctgtcatcgaccaaggttcttacgacaagatcatgagctacattgaaatcggaaaagaagaaggccgtttagtaagcggcggcaccggagatgattcaaaaggctactttatcaagccgacgatcttcgctgaccttgatccgaaagccagactcatgcaggaagaaattttcgggccggtcgtggcgttttctaaagtatcaaactttgatgaagcactggaagtggccaacaatactgaatacggtttgacaggcgcggtcattacaaataaccgcaaacatattgaacgggcgaaacaggaattccatgtcggcaacctgtacttcaaccgcaattgtacgggagcgattgtcggctaccatccgttcggaggcttcaaaatgtccggcactgattcaaaagcgggcggcccggattatttggcccttcacatgcaggcgaaaacaatcagtgaaatgttttaagagggactgaatgggcatcctcctcgcggggggtgtccatttcaccataaacatataaagcggaggaggaaatgccatagcaaacattcagttgattatttccatttgtatttatatggcgggcatgctgtttatcggttattttgcctacagacggacgtcaaatctgacggattacatgctcggggggcgttctttaggccctgccgtcacagcgctcagcgcgggggcggcggatatgagcggatggctcttgatggggcttccgggcgccatgttctcaacgggattaagcggcgcttggattgtgatcggacttgtgctcggggcgtgggcgaactggcttttcgtcgcgccgagactgagaacgtataccgaaaaagcggggaattccatcaccattccgggtttccttgaaaaccgtttcggtgatcatacgaagcttctcagactgttttcgggtctcgtcattctcgtctttttcactttttacgtatcatccggcatggtgtccggaggtgtcttattcaacagcattttagggttgaattaccacacgggactgtgggtcgtgacaggcgtcgttgtcgcctacaccttgttcgggggctttttggcggtaagctggacggactttgttcaagggatcattatgtttgcggcgcttattcttgtgccgattgtgacgattttccatacgggcggcccgggggaaaccgttgccgatatccgttccgtcaacccggaactgtttaatatgttcaaagggacgaccgtcctcggcattatttctttatttgcgtgggggctcggctatttcgggcagccgcatattattgtgcgttttatggcgatcacatctgtgaaagagatcaaacgcgccagacggatcggaatgggatggatgattttgtctgcactcggcgcgctgtttacgggtcttgcgggaatcgcgtattaccaccagcgcgggttgaagctggctgatccggaaaccatttttattcagctcggcaacattctgttccacccgattattacgggatttctcatttctgcgattttagcggccattatgagtacgatttcgtctcagctgctcgttacgtccagttctttagtagaggatttgtataagtccatgttcaggcgttcagcttctgataaggaactcgtatttctggggagaatggcagtgcttgcggtgtcaatcatcgctttggtgctcgcctgggagaaaaacaacacgatacttggtcttgtcagctatgcatgggcgggattcggcgcttcattcgggccggtcgtactgctcagtttattttggaaacggatgacgaaatggggggcactcgccggcatgattgcgggagcgattaccgtaatcatttgggcgaatgccagtctttcagactttttgtacgaaatcattccgggctttgctgtaagccttgccgctgtatttgttgtcagcttattgacacaggctccgtcaaaagatgtcacagatcagtttcatgactaccgtgatacactttctcaataaaagcaaggaacgagaggaagaagggaccgccctttttcctcttttcacgatacaggctttcggatcattccgttttgggagtatatgaatttttttctatacaaaaagtcacccctcagagtatgataaagataaaaagagcataggagaaataggtatggaagagcttttagagagagttttttcatttacggacattgataaattaattgatttcatcagttatgaattgcagaagcccgttattctggaaagcgcggatttctttttgcttgcctataattcttattacattaatcacttcgactccgccaaccagcagacgatattctcaaaaaaatgccccgtgcagatttttgaaaggtttctgaaggacggggtgatcgaaaagctgaaaaccgttcctgaaccgttccgtgtcgaaaaaatagacagtatcggattgaatcagagagtggttgtaagcgcaaaacataaaggggaagtgatgggctacatctggattcaggagctcgaccgaaacttgacggacgaggagctcgattttttatatgaaacttcattccatgtcggaaaaatcatctacaaaacgaaccggctgaaacaggaaaaagaagagagagcggaagacctggtgaaacgggcgatctttcagcaattctcctctgaaaaggagttcaggcgggaagcggaaaagatgaacgccgtgctgccgtcggttttttcggtagtcgtcctgcacgccgcaaatggggatggggaggcagtcgaagatgtaaaggaaaatatcaaatcgtacttgaatttgcgggataaagtcagccacgtcttaaccattgattccaatattgtcatcgtcgtcgcaagcttctcgcaaaaaagctccggcacttcggcagcatctgaattcatccacaaactgctgactcattttcactttcagaagatccccactcccatctatatcggaatcggcaatgaatacagcagcatcctgaagctcggcaaaagttatatagaagcccttgaagttataaaggccgccgaaattaccggaaaccaggaaaatatcccgtacgaatacagtaagctcgggatttaccgctatcttgaaagcatcgaagaaaaaaacgcctcactggaatatgtaaacgatgatttagcgttattaaaagccaaagacagagaaagcagcaccgaactgctgaaaacgttagaaatctatctcctcaataactgcaaaacaaaaccagccgcagaacagctttttattcatcaaaacacattgaactaccgcatcaaacagattcttgacatgacatcaattaatttaaacgacttcaggacaaggtgccagctgtatctcgatatcatgctgatgaaaaagagataaaaaagaaaccagtcgccgtactggtttcagttttaataccttcccgcttatcaatctcagaacctcacttctgaatcactcctttcccgcaagatgagaaatgaataaacactgctcctcaatatatgttatactttcattgatattgattctcaattaaaaaagtatgaagtatagatataaacgggaggcagaacgatggcggaaaatcatgaggtgtacgacgtcacgattataggcggaggcccgatcggcctgtttgcggctttttattgcgggatgcgggagctgaaaacgaaagtgatcgagtttttgccgcggctcgggggaaaggtgtctatgttttttcctgaaaaaatcatccgtgatatcggcggaatacccgggattgccggggaacagctgattaagcagctgaaggagcaggcggcgacatttgagccggatatcgtgttgaatcagcgggtggccggatttgaacggctggaagacggaaccattgtgctcgaaagttccgaaggggaaaagcactatacgcgcacggtgattttggccgtcggcatggggacgcttgaggtcaatgaacttgacagcgcggatgcgagccgttattcaggaaagaaccttcattataaggtggagaagcttgatgcgtttcgagataagcatgtcgtgatttccggagggggagataccgcggttgactgggcgaatgagctggaaccgattgcggcgtctgttaccgtcttgcaccgccgtgaggagtttggcggtttggaaagcagcgtggcgaaaatgaagcggtcttccgtgcgggtgcttgcgccgtatcgtctgaagcatctcaacggcaccggggaacggatcgagagcgtcaccgtttgccaaactgagtccggactttctgaagtcatcaagcttgatgagctcattatcaaccacgggtttaaaattgatctcggtccgatgaaggactgggggcttgagatagaagaaggcaggattaaagctgacaggcatatgcgcacgaatcttccgggcgtgtttgtcgccggtgacgccgcccattatgaaagcaagctcagactgattgccggcggtttcacggaggggccgaccgcagtgaacagcgccaaagcctatttggacccgcatgcggatcagatggcgatgtattcgactcatcataaaaaattggtgacacaataaaaaagggctgccccccgatgctgggtccgggggtcagaaaagcattccggcgtatcagctgtgaacgagcatgtctttcatttcatttcgtataaacgcaaataactgttcctgatttttcacggcggtaaacccgcagccggcggggaggtcttcgcccatgcagatgacgggagggcggtttcctctcgggttcggtgatatgccgatttgttttccggcgctgatcaaatgctgagcggattctttgcccgtacagataatcatttgcagaggtgactcactgatcgtgcgttcgatcatggaagtgaatcgctcatccgcgatatgttcatgggtgatataaaacaggcatgattttgagtctggcaagttttctgctgcttgacggctccctacaatgagagaatgcggagaatcattttgccattcggataggagaaagccccgttttgtcagttccgtctttgcggcttcagtcgctgcattcaggcttgcggtcacccggcggatgtcgatctgcttgaaagccagtgtgtcaaagaattcgcataccgcaaggcgtgatgtgaaaaatagttgttcaaaggtgctgatctgtttcaggatgttttcgtttgcgggcatttttttaacgatccgcttcggccattcaataacatcggcgccatactcgcgcagcttgtctgtcaatgtatgttcatcatccccatgagtgaccaccatgatatgccgtccgatgaacggtttgctttcaaaccagctgtgtgtttgaaaattgacaatatcaccgatgacgataatggcagggttggtgatgttttggctttgaactttttcatggatatcctgaagcgttcctttaacgctccgctgccgtccccacgtcccccattgaatgacgagtacgggaacggaaggggattttccgtactccataagcttcctgcatataaatgacagatttttaacgcccatgtaaaacacaagcgtttgaacgcttcgggcaagcccttcccagtcgagattcggcctgccgtgcaatgatgtatcatgagcggtgatcatcgcgaaggacgaagcgaaatcacgatgggtgacggggactcccgcatacagcggcgctgcaattcccgaggtgatgccgggcaccatttcgtagcggatgccgtgctgatgaagcgcctctgcctcttcgccgaccctgccgaacacacttgggtctccgcctttcaagcggacgacggtgtagccctccgccgctttttctatcagcagggcatttatctcagactgtttcataaaatggcggtcgggcagctttccgcaataaatgaaccggcagtccggtgaggcgtattctagaaactttgggtttgcgagccggtcatacaaaatgatatccgctttctccagagcctgttttccttttacggtgatcagccccgggtctcctggtccggcaccgacaaagtatacgattccgtttttcatgatggcgtcatcccttcagcaatttaaaaaatgaaggaccacttggaaaagtgatccggtctttgatcaatacaggaggtatacattctctccttcgatcagtgtttcgtatgttttgacacagccatgatccggctcttggacttttccgtcttctaaggaaattttccagtcatgcatcgggcagaagacgtattctccgctgacgatgccttcagccaggacgccctctttatggggacagcggttttcgacggcgcggacgctcccgtcagaaagcttaaatacggcaagctctttatcttctatatatacggtttttcctaactcctcgggtaattcgtttacattgcctatgcaaacctttgtcatatctttattaaccatgtccgttcccccttactgttttatgaagtcgtgacgacattttcgaatagatctttagaagcttttttatctttaaggaagtattgccacggatctttgtggacagagagtgtctcattcattctgtcgttgagctcctgccgtttttccggatcgtttaatacggattggacatgagataaaccgacgcgctcaagccatgcggatgtccgctccagatagtttgccgtttctctgtagtactgaaggtaagcacccgcgtattctaagacttcttcattcgtttttactttcatcagcaaatcaccggcgcgcaaatgggttccgccgtttccgccgacataaagctcccagcctccgtcgatgccgacaacgccaaggtccttaatgcctgattccgcacagttccgcgggcaggcggacacggccattttaaccttatgaggcgtattgagcccttcgaattttttctcaagcgcaatacccagtgccatggagtcttgtgtgccgaagcggcagaattgttcgcctacgcacgtttttaccgtgcggagtgtttttccgtacgcgtagcctgacggcatatcaagctcggcccatactttcggcagatcttcttttttaacgccgatgagatcaattcgctggccgccggtcattttaacgagcgggatctcatatttgtcgacgacatcggcgatcttgcggagatcttgagagttggttacgcccccgtacatccggggaacgactgagtatgttccgtctttttgaatattggcgtgcatccgttcgttcacaaaacgggatgttctgtcatcctcgtatgtagccggattaatcatgcctaagtagtagttgagggcaggccggcatttggagcagccttccggcgttttccagccgagcacgttcatgatttctctcgtatgtgagagccctttggctttgatttcttctacgacttcatctctcgacagtgaggtgcagccgcaaatcgcttctttttgcgcggatgagtcaaattctgagcccagtgtatattgaagaatgtcttctacgagcggtttacagcctccgcaggaacgggatgccccggtgcatgctttgatttcgtccgttgatgtgcagcctttttcctgaatggcttgaataatggcaccttttgaaacgccgttgcagccgcagatgatttcatcgtcgctcatcgccgcggtcatgcttacgcctgcttcctgatcaagaggctgtaagattgatattttggaggtttcagagatatctgcttctttttgaatcatagaaaacaggcggttgccttcgctgctgtctccgaacaaaacagcgccgacaatttgattgcccctcaggacgatttttttataaatgccgtcctgttcatcgaacacttttattgcctttttgtcctctgattcatcaaagtcgccggcagagaagacctcgacgcctgatacctttaattgagtggagagaacggagccttcgtacggttttgtttcaatgccgcaaatatgtttggccagcacttttgcctgttcatagagcggcgccacaagaccgtacgcgattccgcggtgctcggcacattcaccgaccgcgtaaatgtgcggaatttcagtctgcatataatcgttgacaatgattccgcggtttaccgggatgccgctttctgtgccaagctgtgtattcgggcggatgccgaccgccatgacgaccagatcagcttcgatgcttgtgccgtctttaaagcgtacgccttcgacacggtcagtaccgagaatttcttcggtttgtttttcaaggaaaaatgtcatgccttgtttttctaactcgttttgcagcaggcgtcccgccgctgcgtcaagctggcgctccatcaggaatggggcgaggtggatgacagacacgtccatgccgagattcagcagtccgcgcgcggcttccaaacccagcagtcctccgccgatgacggctgcttttttatattgttttgacgcggcgagcatcgtgtcggtatcttttatgtctcggaatgccgtgacgccttgtttgtctgcgcccggaatcggaaggataaaagggacagagcctgtcgccaggatgagttcatcgtaaggctggattctgtctgcatcggtgatgacggtttggttttccgtgtcgactttgatgactgtttcaccggtatacagctgaatgttgttttctttgtaccagttccaatcgtttaacgtaatgtcttgaatgtcggtatcgccttgcagcacttttgacagaaggattcggttatagttgggatgaggttcggccccgaatattgtaatctcaaattcgtcttttgaaacacgcagtatttcttcaatcgctcttaccccggccattccatttccaacaaggactagctgtttttttcccatcagatgatccgctccttatctttgtttttttcagcgtagcacagcaaaaacaaatatttaagatgcatgttatgaaatgtaacaaaaaatacgaaaaaatctaaaaattttatgaaaattagatagggatgattcgtaccgcacacatcttaaaaccgggcattttacagtccggatccaaggcttcaccaattaaatcgttgacgttttgcgtgtcagaccaatggatggggacaaacaacgtgtgatgtgtctgacttttacttgattttaaacggagaatacatcaaaataaatagtaacgattgcgatttaaaactatgtacatcatgatgaaaataaggcagttgcgagatataaatcgtaatcattctattttatcaggggctattgatatgaaaaaaattccggttacagtattgagcggctatcttggtgccggaaagacgaccgttttgaatcatattttacaaaaccgcaacggtttaaaaattgccgtcatcgtcaatgacatgagcgaagtaaatatagacgcgggcttggtgaagcagggaggcggtttgtcaaggacggatgagaaacttgtagaattatccaacggctgtatctgctgcacgctgcgtgaagatttattagtcgaagttgagaaactcgcgaaagacggcaggtttgattatattgtcattgaatcaacagggatcagcgaaccgattccagttgcccagacattttcttatatagatgaagaaatgggcattgatctgacaacattctgcaggctggacacaatggtgaccgtggtggatgcaaaccgcttctggcatgatttccagtccggtgacagccttcttgaccggaaggaagcggcgggagaagaggatgaacgggagattgccgatttattaattgaccaaattgagttttgtgatgtgctcattttaaataaatgcgacatggtgggcgaaaaagagcttgaacagctggaaacggttcttcgcgcattacagccccgtgccagactgatccggtccgttcgcggagaagtgcccgccgaatgcatattgaataccggtttatttgagtttgaggaagcgagttcatcagcaggatggataaaggaactgacggcaggtcatgaagcgcacactccggaaacggaagagtacggcatcacttcgtttgtgtactcgcggcgtctgccgtttcataccgttcgttttgacagctggctgcatcaatcaatgcctgacaacattgtgcgcgcaaaaggaattgtttggtgcgcaacccgcaacagccttgcgctgctgatgtctcaggcgggtccggcggtttcgattgagcctgtttcttattgggtggcggcaatgccgaaacttgagcaggagcagatcaaaaagcaggaaccggagattctggaagattgggacgaccaattcggagatcgtcatacgaacttggtgtttatcggaacagatttagatgaagccgccattacaaaggaattggatcagtgcctgctcacgcagtctgagttcgattctgattggtcgcagcttgaagatccttttcaatgggatattcagcgggccgaataacataccggccaagtttagaagcaggtgaaaagggaaggagtgatgaaaaaggagctgaccaagtgtgaaagcattgacataccaaggaaaagaacatatggaagtgaaagaagtcccggcacccgccattcaagatgagagagatgtcatcgttcgaatcaccgcaaccgggatatgcggttcagaccttcatttatataaaaacggaatacccgccgatccgggttatattgtcgggcatgagccgatgggaatcgttgaagaaacgggcagtcaagtcaaaaagctgaaaaaaggcgaccgtgtcgtgattccttttaacatcggctgcggagaatgtcattactgcaagcaccagatggaaagccagtgtgatgaatcaaatccaaatcctcatacagatgccggcggtttattcggtttttcggagtttaacggtaattatcccggcgggcaggctgaatatttacgtgttccttttgctgatttctcttcttttctggttccggcagacagtgagcttgaagatgagcaggtgctgcttctgtcagatgtcatgccgaccgccttttggagcgttcagcacagcggagtgaaaaaaggagatacagtcgttattttgggatcaggtccgatcggcttaatggcgcaaaaattcgcgtggaaaaaaggagctaaacgggttatcgcagttgatcaagtcccgcatcgccttgaacatgcgagacgcataaacggagcagagaccttcaatttttcagaacatgatgagatcgggaaactgctgcatgaacaaacgtcagggggcgcggatgtagtgattgattgtgtcggaatggacggcacgccgctttcaaaagaaaaagcagagcaaaaaccgaatcagttcggaacgatcagcccgattcttatagcatcagaagccgttaagaagtttggaaccgtgcagctcacgggcgcatacatttctgaagcggacggctttccgctcggtgatttttttacacgcaacgtttctttaaaaatgggccaggcacccgttattcatctgatgccgatgctgtatcaaatgattgaacaaaatgaaattgatccgacggatatcattacacacaaaatgagtcttgcggaagctcctgctgcatatgatatatttgacaaaaaagaagatggcgacattaaagtgattttgaagccatagcgaggggaaacatgatgaatatttacagaccggcgggattttggatcagattgggagccgttgtactcgactatttaattacttcagtgcctttggcgattatttttatgctggcaacaggaaaagacccgaatgagagcgcaatgatcagcatcattttgactctttatggtattttgctccctgtatactggaacggttatgttatcggcaaaaagatctgcggtatccgcatcgtcaaaaaagacggaaaccaggcaggctttcttactatgattttgagagtgcttgtgggcggcctgatatatggcgtgacgtttggaatcggtgtgatcgtgagcgcattcatggtcggaatgagagaagacaaacggtcaatccacgattttgtagcgggaacgtatgtcacatacgcactgccggacgaatcgattgaaaagagcgaataatttcgctctttttttgcataaaaaatggatgagggagcaacatataacaaacgttaaaggaggaaagagtcatgaaaaaagctgcattgtctttagctgcgtttttcattacagcaatggttttcacaatgccggcacacgccgaaacaaaaatgccttcaacaatgtcactcacggaacagcagaaaaaagaaattgaatcacttgaaaaagaagtgctcgaaaaacgcaaacatgtcatatccaaatatgttgagtacggggtcctgccgaaagaaaaagcagaacatattaaacagcatatggacaggcgctttaatatgatgaaacaaaatggctttgtcccgaagcctccgcctcataaattggaaaagcggcatcatcattcttaagcatccggcaagccggatgcttttttgtttttatcgggattgctctgaaatgcgtttcaaaacgtatgatatcaatatcatacgcatcaggaggatgaaacacatgatacataaaaaacagggtctgttccctgatacatttctatgggggtcagcttcggctgcctatcaggttgaaggagcttggaataagacggtaaaggaccttcagtatgggtgaactgtgcagagaggctattagtgacggagttcatctcatcggctgctgcagctggtcattcacggatctgtttaagctggctgaacggctatcaaaaacgctacggttttgtgtatatcaatcgagatgaagaagatgaaaaagacttgaaacggatcaggaaaacagtttttattggtaccagaatgtaattgaaacaaacggtaaaagtttataaaagttccctgagagaaatatgattctctcaggggtttcttttacattgcgtctgcatcaataatatacgtatccgcatgaagatcggatatttcggcaggcactgaataacaggtaaggctgtatcggcctttcggaatattaaagaaaagccgctttgacatcacgctttcaatctcaattccatcttttacagcctcaaagggaacagtcgcttttttctcataggatagtaccggttcacttgtgttaagcctgaagacgataaatgccctcgtatttctccttgcttcgaatgaaacagctccgtcagcttccgcatatcctttttcaatggcttcatcggtccaatcgataacaggcggttctgaatctttttggaagattgtaaattgatgatacgaaatggccagttcttgcggtttccatgatttattcaatgcgctgttcctcctgtttttttacttgattttaaataatactctcgttccgtcgggatcattggtaagctggtgtccgacccaagagccggctccgcggttgtctgccggagaaatatattctacggaggcattgtttccgccctgtttacaaaccgccatcggccattcatccctatcgtatcccgttttgacaggcacatgtttaagagattgctcacgccgcttatgtactccgtctctgtcaatggtgcatatgctggaatgcccttcttttatcgcgtccttaatatgctttgctgtttccggatatcgatcggacggaaataggattactttgtcgtaatcactcttctgaacggtctgctcgttatctgagaaaagatcacccttgatcagggccgcgactgctccggcaatgatgataagaacaagcagcagtgcttttaatgttttcaagagtatcaatcacctccagttttaaattgctgtaaagctggtccaagaataaagcagaatcggccggctgtaaagctgttaaaatatatttctcagccgcaattcagctgaatatctgtaaaaccatccgcacaaatcaattttattcattaaatatccgatcagaaagtgttttttgccgtttccctattcagaaatgaacggttgcggccgtatcgtcaattgacttattatagcgataagctcaccggcaggatatcttcgtctgcgagtgtccgacccgaaaaccttggcctgcatgaccgtgcgcaacaagacgataaaaagacggccatctgataagaaggccgtcagtaaatcattccagattcgcatgctttgtaaacatgtctgctgaattcagttcttttttctccatgatttttagaataaccgcatcgtaaaacagcagaagagtttgttcgaataaagaacccatcggctgaatcgtctttctgtctccgccggtctcttccttaggagagccgggaatcgttatcgtaagatccgcaagtttgccgagacttgaatcggggttaatcgttaatgcagtgatgatgccgttaaggcttttggctttttcagctgtatgaagcagactttttgtttcgcctgagcctgagccgatgatgacgagaccgccttcttggaggggaggggtaagcgtctcaccgacgatgtaagcgttcaggccgatgtgcatcatcctcatggcgaacgctttagccataaagccggaacgccccgctccggacgtgaagatttgatctgccgataaaatctcatctgcaagcttgtcagcttcactgtcggctattaatgctgcggtgcgggatatttcattgagtatttcatgtaagtattcagtcgttttcatgatccttgtgaaatcagctgtttcattttagcagcagcatccgctttattgtcagctcccgtaatgcctccgccgacaatgattaaatctgggttttgtttgatggcttcaggaagcgtatcaagtttaatgcctccggcaattgcggttttagcgctcttgaccgcttttttaatcgccgtcagttcctcgaatgaattctttccttctgcttgaagatcataacctgtgtgaacacaaatataatcaacaccgagttggtcaatttcttttgcccgtgtttcaaggttttttacgttaatcatgtcgacgagaattttttctgctgtttttttgcttcggcaaccgcccctttgatcgttgagtcgtctgtcgctcctaaaacggtgatgatgtcggcgcccgcttctgccgctttcatgatctcgtagccgcctgcatccatgattttaagatcggcaagcactttcaggtgaggaaaggctgatttcatttcctgtacggctttcaggccttcattaatgacaacgggagtgccgatttctacaacatctatatattgttcgacctctttcacaagttcaattgcttccgggatattcactaagtctaatgccagctgtaattccactttatatccactcctctttttcatgtatttacattctatagagtgccccgcatgttgagaagtacgcactttgaagtctaatagttactttgaggatactgtccccgcaggcaatgcgctttgtttcagcaaaactgcgtggtagtataaactgatgaaagttgtgtaaaaaagtaagcgtgtatgaatagatgatgaacgtacaaaaagtaagaggaaggagaatggcccgtgagccgaatggatgagaaaacgtttaattgcgaaaaggaattgacgcttgccgtgataggcgggaagtggaaaatgctgattatgtggcacctgggaaaagaaggaacaaagcggtttaatgagctgaaagctttaattccggatattacgcacaaaattcttgtgaatcagctcagggagctggagcaggatctgatcgttcacagggaggtttaccctgtcgtccctccgaaagtggagtactcattaacggagcaaggagagacccttatgccgattttggacgccatgtataagtggggaaaagaatatatggaattaatcaacattgataaaactgcaataaaggaatctttttgaagcgctctatgtaaaatagagtgctttttttgcggtttaatgaaatcatattgcgaacgattaaatctcctgtttcggttcttgcgctgttttttccccatcagctcatatatgaaaactattttcattctgccataactggatattcgagagatttatactatagtttaaagatttttaattttacataaataatatttttaaaaataaattgcgggatgccgcaaaataccctctggaattgtcggaatttttttcggtgtgccgaatgaaacttttcacccatttttcggtgataaaaacaataatttcatataaagtgaacgtaagtagatatatagtaattcatgaagaaataggtaaaccctgttgcttacaaacattggattcttgtcttgatttctcataaatttgagccgcatttcggactgtgcgggtgagtggattgcggatttcggcggtgattgaatcgggatcgttttggaggtaagtggttcttttggcttgataatgagttagggacattgagggaggctgtttctaagggagaattgacaattttatcttaaaaaggggaggcgcacacatatggaaataactttttatcctttaacaaatgctcaaaaacgtatctggtatacagaaaaattctatccgaacacaagtatttcaaatcttgccgggttcgggaaactcatttctgacgacggcgtacaggctcattacgttgagaaagcgatacaggaattcgtccggcggtatgagtcgatgagaatccgtctgcggcttgatgatgagggggagcccgttcaatatgtgagcgattaccgtccgctgactatcgaacatacagacatcaggcaagccggctgctctgcggaagagctgtcaaaatggggacgtgacgaggcaagcaagcctctggcattatatgatcaggatttattccgtttttccgtgtataccatcagcgaaaatgaggtctggttttacgttaatgtgcatcacattatttcagacgggatttccatgacgattctgggcaatgcgattactgatatttatttggagctttcgggcggagcaagtatggaacagacggagattccttcctttatcgagcatgtgctgactgagcaggaatatgtgcagtcgaagcggtttaaaaaggatcgggatttttggaacgggcagttcgagaccgtgccggagcttgtgtccctgaaacggagccaggcagatgcgggtcttgatgcgaaacggttttctcaagaaattcctcacgacttatacggccgcattcattcattctgcgaggagcataaagtcagcgtactatctctgttccaatcagctttgatcacttatctctacaaagtgaccggccgggatgacgttgtcacgggtacgtttatgggaaaccggacgaatgcgaaagaaaagcagatgctcgggatgttcgtatctacggttcctgtgcggacaagcgttgacggaggacagtcgttcttggaattcgttaaaggccggatgaaggatctgatgaaaattctccgccaccaaaagtatccgtataacctgcttgtcaatgatttgcgcgcttcgaaaagttcgctgagcagattgtttacggtggctctggagtaccaggtgatgcagtggcagaaaaaagagaatctgtccttcctgacagaccctattttcagcggaagcggtacaaatgatatttcgattcatgtgaaggaacgatgggacactgggaaattgacgattgattttgactatcgcagcgacatattcaagggagaggagattgtatctgtttctgaacgtttgatcacgctgattgaagatgcgatttcatctcctgatcgcataattgatgagcttactcttctttctgaatccgagaaagagcggctgctgacacgggcctccggtaatccggtgaattaccgcggggagatgacgataccggggctgtttgaagagaaagtgaagtcactgtctgacaaaccggcggtggtgtatgaaggccgaacattgtcctatcgcacattgcatgaacagtcaggccgaattgccggacgccttcttaaagccgggatatcagccgattctcctgtcgcggtgctgcttggccgttctgagcgtgttattgcggcaatattgggaattttgaaagcgggcggcgcctatgtgccgatagatcctgactttccggcggatcggattcagtacattttggaggacagcggagcgaaggctgttctgacagaggccggaatacaggcgcctgcagcggatgccgaacggattgattttgacgaggctgttcagtttgaaacggctgcggacggtgtcagtacacaatcagaccggctggcttacatcatctacacgtcaggtacaacggggcggccgaaaggcgtgatgattgagcaccggcaagttcatcatctggtgcaatcactgcagcaggagatttatcaatgcggtgagcagacattaagaatggcgcttttggctccgtttcattttgatgcgtccgtcaaacagatttttgcctcgcttcttttgggacagacgctttatatcgtgccgaaaacgactgtaacgaatggctcggcactgctggactattatcgtcaaaaccgaattgaagccactgacggaacccctgcgcatctgcagatgatggttgcggcgggagatgtcagcggaattgaattgcgccacatgctcattgggggagagggcctgtccgccgctgttgctgaacagctgatgaacctctttcatcaatcgggcagggcgccgcgtctgacgaatgtctacgggccgacagaaacgtgcgtagatgcgtccgtgcatcaggtgtccgccgataacggaatgaatcaacaggcggcgtacgttccgatcggaaaaccgctcggcaacgcccgtctgtatatattggataagcaccagcggcttcagcccgacggcacggccggtgagctgtatatcgcgggtgacggtgtaggccgcggctatttaaatcttccggatttgaccgcagagaagtttttgcaagatccgtttaacggaagcggccgcatgtaccgcacgggtgatatggcgcgctggctgccggacgggacgatcgaatatatcggacgtgaagatgatcaggtgaaagtccgcggctaccgtattgagctgggagaaattgaaacggtgctcagaaaagctccgggggcggcgcaggccgtcgtgctggcacggccggatcagcagggcagcttagatgtttgcgcatatatcgttcaggaaaaaggaaccgagtttcaccctgccgagtacagggagtatgtgtccaagcaccttcctgattacatggtgcccgcttactttacaaaaacggacgaaattccgctcacgccgagcgggaaggcggaccgcaaaaagctgtttgcgcttgatgtgcaggctgtcagctcatccgaatatgccgcgccgagaaacgaaacggaggaaacgctcaccgtcatctggcaggaagtcctcggaatggacaaggcgggcatttatgatcatttcttcgagtcaggcggtcattcattaaaggcaatgacgcttctgacgaaaattcataagcaaatgggcgttgaaattccgctgcaatacttgtttgagcatccgacgattgcggcgcttgccgattatgcggaaaaccgaaacgaaggaccggcattcagggcgattgagccggctgagaagcaggcgagctatccgctttcgctcgctcagcagcggacttatatcgcgagccaatttgaagatgcgggagtcggatataacatgccggctgcggccgtgattgagggcgctttagaccttgaaaagctcgagcgtgcattttctgccttaatcagcaggcatgaagcgctcagaacatcgtttcaatcggaggacggcacgccgagacaggtggttcacgaacatgttccgtttcatattgaaatgctcgaagcgcgcggaagaacgaatgaacaggtcatgaaggactttgtgcgccgttttgatttatctgaggcgccgctgttcagaatcggcctgcaaacgctcggtcacaatcgccatatgctgctgtttgatatgcatcacctgatttctgacggggtgtctatttccatcatgctgaaggaactggctgacatctacggcggaaatcagctgcctgaattgcgcattcaatataaagattatgccgtatggcaggcggaacgggcgaaagaaggctacaagaaggagcgggcgtactggaaagaagtcttcagcggcgaactgccggtgcttcagctgctccctgattatccgcggccgcaggtgcaaagctttgaaggtgaccgcgtgtccgccaagctgccgaaaatgctgcgggaacggctgcagaagcttgccgagaaaaacggagccaccctttacatggtgctgttatcggcatactatacgctgctttctaagtattcgggacaggaagacatcatcgtgggaacaccgtcagcgggaagaaatcactctgataccgaggggcttatcgggatgtttgtcaacacgcttgcgctgcgaagctccgtgaagcaggatcagacatttgccggcttgttaggtcatgtgcgcaaacaggtgctggacgcgttttcccatcaggattatccgtttgagtggctgaccgaggagctgaacgtgccccgggacatgagcaggcatccgatatttgacacgatgttcagtctgcaaaatgcttcggacggaattccggagatcggcaacctgacgctgtctcttcatgaaaccaacttcaatatcgctaaattcgatctgacaatgcaggcccgggaaacagcggaaggcattgcgctcgatttggattattgcacgaagctgtttaagcgctcaactgcggatcgcatgcttgcgcactatgtccgtctgctggagagtgcggcagctcagccggatgcgaaaatcagcgaatatgatctgctttctgaacgggaggctttgaaccaattacagcggttcaatccggagcgcacggcatacccgaaagagcaaacgatcgtgcagatctttgaagaacaggcccgaaagaaccctgaccggacggctcttcagttcgaaggggaaactctgtcgtatcagcagctgaatgaacgcgccaacaggcttacgcggcatattctttcggtcggaggcggcgggaaaaccgcggctgttttatgtgaacggtcaatggacatgattgtttccattatggctgtgttaaaagcggggtccgcctatgtgccgattgatcctgagcatccggttcagcggattcagcatttcttccgcgacagcggggcgaatgtgctcctgactcagcaaagcctcaagccgcttgcggaaaaggccggttttcaaggcgtcattgtgcttgctgatgatgaggcgagctatgaaaaggactctcgcaatccagcattgccgtttgattccaaaacgattgccaatctcacgtatacatcaggcacgacgggaacgccgaaaggaaacatcgtcacacatgccaacattttgcggacggtaaaaaacacgaactatttgaccgtttctgaagaggacacagtgctcggtctgtcaaactacgtctttgacgcttttatgtttgatatgttcggttcgctgttaaacggtgcaaagcttgtgatcgtcccgaaagatacggtgctggacatgtcgcgcctgtcccgtgtgatcaaacgggagaacgtcagcattctgatgattacgacggccctgttccacctgcttgttgatatggagccgtcctgtctgacgacgcttcggaaaatcatgttcggggcgaaagagcgtctgtagaacatgtcaaaaaggcgctggcggcagtcgggaaaggaaaactgcttcatatgtacggtccgtcggaaagcacggtgtttgcgacataccatccggtggatgtcattgaagaggatacgctctccgttccgatcggtaaaccggtcagcaatacggaagtctttattatgaactcagccggacgcattcagccggcgggtatcgcgggagagctgtgcgtcagcggggaaggtctcgtagaaggctactacaaccgtcctgaactgacggaagaaaaatttgtaaagcatccgtttaaggaaggtgaacggatgtataaaacgggcgacttggccagatggcttccgaatggcgatatcgagtttatcggacgcatcgaccatcaggtgaaaatccgcggtcagcggattgagcttggcgaaattgagcatcagcttcaaagccatgatcagattcaggaatgcattgtgctcgctgtggatcagggcgcgggtgacaaacttctttgcgcgtattttgtcggcctcagggaaatatcttcccgggagctgagggagcatacggcgaaggatcttccggcttatatgattccgtccgtctttattcaattggatgaactgcctcttacagggaacggaaaaatcgacaggcgggcgctgccgatgccggatgtgaccgcagcgaatgccgtgtcatatacggcgccgcgcaatgaaacagaacaaaaactggcggatatttgggctgaggtgctgcaaatggaacgggtcggcgtccatgatcagttctttgagatcgggggccactcgttagcggggatgaaactgctggcccttatccagaagacattcggcgtgcagcttaccttaaaggatctgttcacttctccgacggctgctgggctggcgcagctgattgaaggggctgagcggaaggcggctgagagcatcgcaccggctgcggagcgggaaacgtatccggtttcttcaccgcagaagcggatgttcgtgcttcagcagctggaaggcgctgaaacaagctataacatgccgtctgtgctccgtttaaaaggaaagcttgatgcagaaaagctgaaatccgtcatgaaacagctgacagaacgccatgaagccttcagaacgacatttgacataaaggatggagaaacggttcagcgtatatgggcggaagcttatatcgacatggaatattatgaagcctctgaagaagatgctgaacggattattcagagctttatccggccgttccgtctggatcagcttcctctcgtcagaacggggctggtcaagctggctgaacatgaccacctgctgctgtttgatatgcaccatatcatttcggacggcgcttcagtcggcgtgctgatagatgaactgtcccgcttgtatggcggcgaaacgcttgagccgctgcggattcattataaagactatgcggtatggcagcagaaatttattcaatcagagcagtaccgcaagcaggaggagcattggcttcgggagcttgacggcgagcttccggtattgacgctgccggctgattacagccgtccggccgtgcaaacctttgaaggagacaagctggtcttttctctgactgaggaacagacgtcggctcttcgcagtcttgcgaaacaaacggattctaccatgtacatggtgctgctggcgtcgtacagcgcctttctctcaaaactgagcggacagcatgacatcattgtcggctcgccggttgcgggacggtcacatgcggatctcgcaaacgtcatcggtgtttttgtgaatacactcgcgctgcgtacgtatccggaagcggacaaaacgttcacggactatcttaaagaagtgaaacaaaccgctttacatgcatttgacgcgcaggattatccgcttgaagaccttctgcaaaaggttgaggtgcagcgtgatacgagccgaaatccgctgtttgatgcggtattctcaatgcaaaatgcaaatgctgaagatctggtcatggaaggaattgagctgaagcaccacccgtttgacagaaaaacagccaagtttgacctgacgatgacggctgaggacacagacgaaggcttaacgtttgtgcttgaatataacaccgcgctgtttaaaccggaaacggcagagacgtggaagcattattggcttcaactgttaaaagccgcaacggaaaatccggctgcgaagctttctgagctttccttggtgaatgaaacagaaaaacaagccctcctcaatgcatggaaaggaaaaacaatttctgtgccgcaggacaaaacggttcaccgtctctttgaagaaacggccgcccgatacgcgaaccggccggccgcggcatataacggcgcgaaatggacgtacggcgagctgaacgcaagggcgaaccggatcgcgcgcattctcatagactgcggcgtcacggctgacgaacgtgtcggcattttgacgaaaccgtccttggaaatggccgcgggcgtactcggcgtcctgaaagcgggcgcggcatttgtgccgattgaccccgactacccacaagagcggatcagctacattctgcaggacagcggcgccaagcttcttctcacacaggaagcgctggacgtaccggatggctacacaggagatacgattctgcttgacggcggacgctccattctgagcctgccgcttgatgaaaacgatgaagcgaacccgcagactgaaacaacggcggatcagctcgcttatatgatttacacgtcaggaacgaccggacagccgaagggtgtcatggtcgaacaccatgcgctggtgaacctgtgcttctggcatcacgacgcattcgccatgacggcggatgataaaagcgccaaatacgcgggctttggttttgacgcctccatctgggagatgttcccgacatggaccatcggcgcggaacttcacgtcattgacgaagcgatccggctggatatcacccgcttaaatcactatttcgaggagcacggcgtgaccatcaccttcctgccgacgcagctggccgaacaatttatggagctggaaaatacctctctccgcatgcttctcgtcggcggcgacaagctgaagcgggcggtgaaacagccgtacacgatcgtcaacaactacggcccgacggaaaacaccgtcgtcgcgacaagcggcgtcatcaatcctgaggaaggatcgctttcgatcggacgggcgattgccaatacgagagcttatattctcggcgacggcgatcaggtgcagccggaaggcattgccggtgaattgtgcgtggccggccgcggtctggcacgcggatacctgaaccgtgaggaagaaacggcgaagcggtttaccgcagatccgttcgtgcccggcgagcgcatgtaccggaccggcgacctcgtcaaatggaacgcgcagagcggcatcgaatacatcggccgtatcgaccagcaggtcaaagtgcggggctaccggatcgagctttcagaaatcgaagtccgcctcgcccagcttgcggacgttcatgacgcagcggtgacggcggtggaagacaaagcgggcaataccgcgctttgcgcctatgtcgcgcctcggcaggacgatattgaagcgctcaaagccgcgctgaaagacacgcttccggactacatggtgccggcgttctgggtggagatggacgagcttccggtcaccgcaaacggaaagattgacaaaaaagccctgccggaaccggacattgaagcgggaagcgccgcttataaagcgccggaaacggagatggagacgctgctttccgacatttgggaggaagtgctcggtcttgatcagatcggcgtaagcgataatttcttcaccctcggcggcgactcgatcaaaggcatccaaatggcgagccgcctgaaccagcacggctacaagctggaaatgaaagatctcttccagcacccgaccatcgaagagctcgtctcttatgtggagcggacggaaggcaagcaggccgatcagggacctgtcgaaggcgaagcggagttaacgccgatccagcgctggttctttgagaaaaacttcacggacaaacaccactggaatcaatccgtcatgcttcatgcgaaagacggctttgatccggagataacagaaaaaacattacatgtcctgacggtgcaccatgatgcgctccggatgatttatcgtgaacaaaaaccgtattacagagggcttgaggatgcgtctgttgaactgaacgtctttgagctgaacggacctgctgaagatcatgaggaccgtatcgaacgggaagcagaccgtcttcaaagcagtatttcactggaaacaggacatctgctgaaggccgggctcttccgggctgaagatggagaccaccttcttctcgcaatccatcacttagtcgtggatggtgtatcttggcggattttactggaggacttcacgtccgtttatacgcagctgaaacaaggcaatgaaccggcgctgcctccgaaaacacattcattcgccgaatttgctgagagaatcaaagaatacgcaaatacgaaggcgtttctgaaagaagcggattactggagggggcttgaggagaaagaggtatgcactcagcttccgaaagacaggcagtctggcgatcagcgcatgagacatacgagaacggtcagtttctctctgacgcctgaacaaactgaacagctgacgacaaacgtacatgaagcctaccatacggaaatgaacgacatcctgctcacggcgctcggactggcgctgaaagagtggacgggtgaagacacgatcggcgttcatttggaaggccacgggcgcgaagacattcttgacggcctgaatatcacccggacggtcggatggtttacgagcatgtatccgatgatccttgagatgaagcacgccgacgatctttcatatcagctgaaacaaatgaaagaagacatcagacacatcccgaacaaaggagtcggctacggcattctgcgttatgtaacggcgcctgagcataaagagggtctttcatttgagattgatccggatatcagctttaactacttaggccagtttaatgagatgtcggattccggcttatttacaagatccgggatgccgtcaggacaatcgctgagccctgacacagagaagccgaatgcgcttgatattgtcggatttatagaaaatgggcagatgacgatgacgtttgcctatcattctctcgaatttcatgaaaaaaccattcaatcgttcagtgacagctttaaagggcacctcttgaaaatcatagatcactgcctggcccaagacggacctgagcttacgcctagcgatcttggcgatgatgatctgacgcttgatgaacttgataaattaatggaaattctctaacagaaaagacagaggtgacatatgagcaaaaaatcgattcaaaaggtgtatgcactcacaccgatgcaggagggaatgctgtatcatgcgctgcttgatccgcattcttcctcctacttcacacaattagagcttaggattcacggaagctttcagcttgagctttttgaaaaaagtgtcaatgagctgattcggacatatgacatcctgcgtacggtattcgtgcaccagcagcttcaaaaaccgcgccaagtcgtattagcagagcggaagacgaaggtgcactatgaagatatcagtcaattagatgaagcgcgccaaaccgaatatattgaacgctataaacgcgatgtgcagcagcagggctttcatctggcgaaggatattctctttaaagcggcggtgttcaggctcagtgagaaggaactgtatctcgtctggagcaatcatcatatcgtcatggacggctggagtatgggcgttttgatgaaaagcctgtttcaaaactatgaagcgcttcgtgccggccggcccgccgggggaagccagggcaaaccttactctgactatatcaaatggctcggaggcagggattatgaggaggcggaacaatattggagcagccgcctggcggatttcgaacagccgagcctgctcccgggccgtctggcatcagaaaagaaagactaccaaaatgaagaatattcttttgtctgggatgaagagctggtcgcgcagattcagcagaccgccaaccggcatcaagtcacggggcctaacctgtttcaggccgtttggggtgcggtgctcagcaaatacaactatacagacgatgtggtgttcggcaccgtcgtatcaggccgtccttcagaaatcaacggcattgaaacgatggcggggctgttcatcaatacgattcctgtcagaatcaagattgacaaagatgcagccttttctgacgtgatggcggcagttcagaaaaacgccgtggaagccgagcgctatgattatgtgccgctctatgacattcaaaagcgctccgctctggacggcagcctcttgaatcatttggtcgcgtttgaaaactatccgctggacaaagagctggaaaacgggggcatggaggaaagactcggcttttccattaaagttgaacatgcttttgagcagacgagctttgatttcaatctcatcgtgtatccgggaaaaacgtggaccgtcaaaatcaaatacaacggagcggctttcgcacatgatgccatcgaacgaacggcgcaccatctgacctgcatgatgaaagcggcggtcggaacgcctgacgcgcccgtgcgggaactcggccttgtttcaggcgaagaagagcggcagattgttgagatattcaatgatacgaaaacggcgcttccggaagaggaggccgttcaccgtttgtttgaagcacaggcaaaccggacgcctgcaagcatcgcgataaaagaagagggacgcgaatggacctaccgtgaagtgaacgaagcggccaaccgcctggcgagacaccttgtgaagagcgggctggaaaaaggccggaccgccgctattatgaacgaccggtctgcggaaaccgttatcggaatgcttgccgtcctaaaagcaggcggcgcctatgtgccgattgatccggcttttccggaggaccgtctccgctttatggcggcagacagctcgattcggctcgtgctgacagttcaggactatcaagaacaagcgggcacattgcaagtcccgattgtcatgctgaatgaaagcgcggatgaaacggtaagcggaacagacttgaatctcccggccggcggcaacgacttggcgtatatcatgtatacatccggatcgaccggcaaaccgaaaggcgtcatgattgaacacagaaatatcatcaggctcgtcaaaccttcgaattacgtgccggttcatgaagaagaccggatggcgcaaacgggagccgtcagctttgatgccggaacctttgaagtcttcggcgcattgctgaacggagcggcattgcacccggtgaaaaaagagacgctgcttgacgccggacgattcgcccaatttctgaaagagcagcggatcacgaccatgtggctgacgtctccgctgtttaatcagcttgcccaaaaggatgccggcatgtttaacacgctccggcacctcatcatcggcggtgatgcgcttgtgccgcatatcgtcagcaaagtgaggaaggcatcaccggagctgtcgctttggaacggctacgggccgacggagaatacgacgttttcgacgagttttctcattgatcaggactacgacggttcgatcccgatcgggaagccgatcggaaattccactgcgtacattatggacgaaaaccgcaacctccagccgatcggcgcgcccggggagctgtgtgtcggcggaagcggagtggcaagaggctatgtgaatctgcctgaattaacggagaagcagtttgtccgcgatccgttcagaccggatgaaacgatataccggacgggggacttggcgaagtggcttccggacggcacgatcgagtttctcggcagaattgacaaccaagtaaaggtccgcggtttcagaatcgagctcggcgaaattgaggcgaaaatcagccaggcggagaatgtgacggaatctgcggctgtgatccggaaaaataaagcggatgaaaatgaaatctgcgcttactttaccgcagaccaagccctttcgccggaagacctgcgcaaaacgctttcggaatcacttccggaatacatgattcccgcgcacttcatccagatgaatcagtttccgctgacggcgaacggaaagattgataaaaaagcgctgcctgagcctcaggctgaagccgttcaaaaagaatacgaagcgccgaaaacggaagcggagcagaaactcgcggacatttgggaaggcattctcggtgtaaaagcgggtgtgactgacaatttcttcacgattggcggacattctttaaaagccatgatgatgaccgctaaaatccaggagcactttcaaaaagaagtgccgattaaagtgttatttgaaaagccgaccattcaggagcttgcgcattatttggagcatgagaccgaggaggaacagcagtttgaaccgatccgacaagcgccttatcagaagcattatcctgtttcctcagcacagcgcaggatgtatatccttaatcagctcggacaggccagcacgagctacaacgtccctgctgtacttctgctggaaggatcagtagacaaaaaccgtcttgaagaggccatgcaggcattaatcaaccgtcatgagacactgcgtacgtcgtttgacatggcagatggagaagtcgtgcagaccattcataaaaatgtgtcgtttgagcttgaaaccgccgagggccgggaagaagatgcagaagagctgacaaaagcctttatcaggccgtttgcgctcaatcgtgcgccgctggtccgttcgaagctgatccggcttaaagaagaccggcatcttctgctgattgacatgcaccacattattacggacggaagctcaatgggcattttcatcggtgatcttgcgaagctttatcaaggcacggagcttgagctgccaaagattcattataaggatttttcagtctggcagcgtgaaaaagcaaatcttgatcagcacgaagcttactggcttgatacgttcaaaggcgatctgccggtgctggatctgccgcttgatttcccgcgtcctgccgagcgcagttttgaaggggaacgcgtcatcttcgggcttgataaacaggtgacggcgcagattaagaagctgctggctgatacggatacgacgatgtacatgttcttgttagccgcttttcaagtgctgctgtccaaatattcggggcaggaagacatcatagtcgggtctccggcggccggaagacagcatcctgatctccaagacgtgccgggcatgtttgtcaacacagttgcgcttcggtcgcatcctgccggcaaaaaaacgttcaagcaatttctggatgaagtgaaaacggcgagccttcaagcttttgagcatcaaagctatccgcttgaagaattaattgaaaaactgccgttaacgagggacacaagccggagtccgctgttcagcgtgttatttaatatgcagaacatggagatcccggccctgcggctcggagatttggagatttcttcttactccatgcatcatcatgtcgctaaatttgatctttccttagaagcggctgagcgcggagaagaggtcggattgagctttgattacgcgaaagccttatttgcggacgaaaccatccgccgctggagcgctcattttgtcaatctgattaaagcctgcgccgaaaatccggatattcagctggccgacgcaagcctgctgtccgctcctgagcgggaagcgctcctttctgatgaaaaacggacggaagcggatctgcctgagggcacttttgtttcgctgtttgaacggcaagcgcagaaaacgcctgatctcacggcggttgcgggcggaacaagtctgacatatcgtgagcttgatgaacgctcgaaccggtttgcccgacaccttcaggcttgcggaacgggcagtgaggacatcgtggccattatgatggatcgttcggccgacttgattaccgcgattctcggcgtcatgaaagccggagcggcatttctcccgattgatccggagactcctgaagagagaatccgctactctctcgaagacagcggaacgaagcttctggtcgtcaatgagagaaacatgaccgcggccgccgtttataaaggaaaaacggtcgtaatggaagacggagaatggcagaacgaaagcgccgaccggcttgaaacggagtccggcgccgaccggcttgcctatatcatttatacctcgggaacaacgggcaaaccgaaaggcgtccagctggaacaccgcaatctaatcaattatgtcacatggttcagccgtgaagccggtttgaccgaagctgacaaatccgtgctgctgtcttcttacgcatttgatctcggctatacggccatattcccgattcttcaggcgggcggcgagctgcacattgtgccgaaagagacgtacaccgcgcctgatcagcttggtgagtatatacagaaaaacggcattacgtatatgaaactgacgccgtcattgttccatatgatcgtcaatacagcccgttttacgtcagaacgccgtttcagctcgcttcgtttagtggtgctcggcggagaaaagatcatcacgtccgatgtccgcaagtttcatgacgtatacgcccataccgacttcatcaatcactacgggccgacggaaacgacgatcggcgccattgcggaacggatcaatatggagcgtcttgatcaatatgagcagcgtcccgtcatcggccgcccgatcgcaaataccggcgcgcttgtattggacggagcaatgcagctcgttcctccgggcgcaagcggcgagctttatattaccgggaaggggcttgccagaggatatcttcaccgtccgcagctgacggcggagaaatttctctcaaaacctttttcaccggacagcctgatgtacaaaacgggagatatcgtccgcaggcttcctgacgggacgattgaatttatcggccgtgcggatgatcaggtgaaaatccggggctaccgcattgaattaaaagaggttgaaaccgtgctgttaagcgtaaacggcattcaggaggcggtcgttctcgcagtcagcgaaggcgggctgccggaactgtgcgcgtactataaagccgacagcgggctgaaaggctctgagcttcgcaaacggctttccgaaacactgccgtctcatatgcttccggcctatttcgtgcaagtagaccgcattccgctcacagccaacggaaaaaccgataaaaacgccctcccgaaaccgggcgtcagccaaacggcgcaaattgcttcagccttgccggaaacggaattggaggaaaagctgtgccgcatttggaaacagacactcggtacggatacgctcggcatcgacgataatttcttcgattacggcgggcactctttaaaaggaatgatgctcctcgccaatattcaggctgaactggacaaaacggttccgttaaaagcgctgttcgaacagccgactgtccgcctgcttgccgcatatatcgaaaaatcggcggtatctgagggatatcggatgatcacaccggcagacagtgcagacgcgtacccgttatcatccgcccaaaaacggatgtacgttctgaaccagcttgaccgggagacaatcagctataatatgccgtccgttcttctgatggaaggagaagtcaatatttcaaggcttcagaaagcgctcaatcagatgatcaaccgccacgaatctttgcggacgtcctttatcgatcaaaaaggccagccgatgcagcagatcgcagaacaggctgacattgacctgcacatttttgaagcagcggacgaggagaaggcggatcttatcattcaggcattcattaagccgtttgatctgagcgcggctccgctcattcgggccgctcttgtcagactgaatgaaaagaaacacctgctgctgctggatatgcatcatatcattgccgacggcgtgtccagaagcatgctggtcaaagagctcgctcacctttacaaaggcggaagtctgccgtcgccgaacctgcactataaagacttcgccgtctggcagaatgaacccgggcaggccgaacggatgaaagaccatgagcgttattggctctcggcattttccggcgagcttcctgaattgaatctgccgaccgattttccgcgtccgccggttcaaagttttaaaggacaatccgtccgtttcagagcggggcgtgagacggaaaaagcggtgcgtgaattaatggaatcatcgggagcgactcttcatatggtgcttcacgccgcgttccatgtctttttgagcaaaatcacgggacagcgcgatatcattatcggttcggtgaccgcgggaagaacgagcgccgaagttcaggaaatgccggggatgtttgtcaatacgcttgcgcttcgcaatgaaacgcaaaaagagcagaccttcgccgggctgctcgaacgggtgaaacaaaccaatctcgacgcgctggcgcatcaggattatccgtttgaggatctgatcggaaagcttgacctgccgagagatatgagccgcaacccgctgttccaggtgatggtgacgacagaagatccggataaagaaacactggaactggagaacctgcgcatcactccgtatgagtcaaaccaaggcacggcgaaattcgatctgacactcggcggctttacggatcaagaaggtctcggccttcagtttgaatatgcgactgatctgtttaaaaaagaaaccattgaaaagtggagcgccgggttcctgcggattctgaagcaagcggcggaaagcccggacagaaagctgcctgagatttcactgatcagcgatgctgaaaaacaagccctccttgacgcatggaaaggaaaaacactctctgtgccgcaggacaaaacggttcaccgtctctttgaagaaacggccgcccgatacgcgaaccggccggccgcggcatataacggcgcgaaatggacgtacggcgagctgaacgcaagggcgaaccggatcgcgcgcattctcatagactgcggcgtcacggctgacgaacgtgtcggcattttgacgaaaccgtccttggaaatggccgcgggcgtactcggcgtcctgaaagcgggcgcggcatttgtgccgattgaccccgactacccacaagagcggatcagctacattctgcaggacagcggcgccaagcttcttctcacacaggaagcgctggacgtgccggatggctacacaggagaaacgatcctgcttgacggcggacgctccattctgagcctgccgcttgatgaaaacgatgaagcgaacccgcagactgaaacaacggcggatcatctcgcttatatgatttacacgtcaggaacgaccggacagccgaagggtgtcatggtcgaacaccatgcgctggtgaacctgtgcttctggcatcacgacgcattcgccatgacggcggatgataaaagcgccaaatacgcgggcttcggttttgacgcctccatctgggagatgttcccgacatggaccatcggcgcggagcttcacgtcattgacgaagcgatccggctggatatcacccgcttaaatcactatttcgaggagcacggcgtgaccatcaccttcctgccgacgcagctggccgaacaatttatggagctggaaaatacctctctccgcatgcttctcgtcggcggcgacaagctgaagcgggcggtgaaacagccgtacacgatcgtcaacaactacggcccgacggaaaacaccgtcgtcgcgacaagcggcgtcatcaatcctgaggaaggatcgctttcgatcggacgggcgattgccaatacgagagcttatattctcggcgacggcgatcaggtgcagccggaaggcattgccggtgaattgtgcgtggccggccgcggtctggcacgcggatacctgaaccgtgaggaagaaacggcgaagcggtttaccgcagatccgttcgtgcccggcgagcgcatgtaccggaccggcgacctcgtcaaatggaacgcgcagagcggcatcgaatacatcggccgtatcgaccagcaggtcaaagtgcggggctaccggatcgagctttcagaaatcgaagtccgcctcgcccagcttgcggacgttcatgacgcagcggtgacggcggtggaagacaaagcgggcaataccgcgctttgcgcctatgtcgcgcctcggcaggacgatattgaagcgctcaaagccgcgctgaaagacacgctgcctgactacatggtgccggcgttctgggtggagatggacgagcttccggtcaccgcaaacggaaagattgacaaaaaagccctgccggaaccggacattgaagcgggaagcgccgcttacaaagcgccggaaacggagatggagacgctgctttccgacatttggcaggaagtgctcggtcttgatcagatcggcgtaagcgataatttcttcaccctcggcggcgactcgatcaaaggcatccaaatggcgagccgcctgaaccagcacggctacaagctggagatgaaagatctcttccagcacccgaccatcgaagagctcgtctcttatgtggagcggacggaaggcaagcaggccgaccagggacctgtcgaaggcgaagcggagttaacgccgatccagcgctggttctttgagaaaaacttcacggacaaacaccactggaaccaatccgtcatgcttcacgcgaaagacggctttgatccggacctggtggaaaaaaccctgcaagcattgattgaacaccatgatgcgctccgcatggtttaccgtgaagaaagggaaggcatcattcagacatacctccctgtcacagaatgcaaggcaagctttgaaatcgttgatctgtacggaacggacgaggatatgctgaaaagccagattcagcggcttgccgatcatcttcagggcagtcttgatctggagaacggcccgctgttaaaagcggagcaataccggacagaacaaggcgatcatctgttaatcgcggttcaccatctcgtcgtggacggggtttcatggagaattctgctggaggatttcgcttcaggttataaacaggcgcagcagcaaaacagcatcgtcctcccgcaaaaaacccactcctttaaagattgggcggaggcgctgaacacgtttgcgcaatcagaagagctgaaaaagcaggcggattattgggcgcaggcagatgcggaagagctccggccgctgccgaaagaccatgatccggacaaacggctcgtcaaacatacggcggccgtgaaatgtgaattgactgaggaagaaacggcacagctgctgacagatgttcatcatccgtacggaacggaaatcaacgacattctgctcagcgcactcggcttaacgatcggtgaatggacggaaaacggcaaagtcggcatcaacttagaaggacacggccgggaagaaatcataccgaacgtcaatatttcacggacggtcggctggtttacggcccaatatccgttgattctgcagatcagcaaggaagacggcgtctcttccgtcattaaaacggtaaaagagacagtgcggcgcgttccagataaaggtgtaggatacggaattctccggtatctgtcatccgatgaaacagaaaaaggcgccgcgcctgaaatcagttttaactacttggggcagtttgacaatgaagtgaaaacggaatggtttgagccgtctccatatgatatgggacgtcaagtcagcgaagagtcagaggcgttatacgcactgagcttcagcgggatggttacaggcggccgcttcgtcatttcctgctcatacaatcaggaagaatatgaaagaagcaccgtcgaaacacagatgcagcggtttaaagacaatcttttaatgatcatccgccattgcacggccaaagaggagaaagaatttacgccgagcgatttcagcgcgcaggatcttgagatggatgaaatgggagacatctttgacatgcttgaggagaatttaacgtgacaaaaacagttaacagaaggggggagcggagcagatgagccagttcaaaaaagatcaagttcaggacatgtattatttgtcgccgatgcaggagggaatgctgtttcatactctcctgaatcccggccaaagcttttacatcgaacaaatgacaatgaaagtaaaaggcagcttgaatatcaaatgccttgaagaaagcatgaatgtgatcatggaccggtacgatgtatttcgtaccgtgttcattcacgaaaaagtaaaaaggccggtccaagtcgtattgaaaaaacggcagtttcagatagaagaaatcgatctgacacacttaacgggcagcgagcaagcatccaaaattaatgaatacaaagaacaggataagatcaagggctttgatttgacgcgggatattccgatgcgggcagccatctttaaaaaatcggaagaaagctttgaatgggtgtggagctaccaccacatcattttggacggctggtgcttcggcatcgtcgtgcaggatctgtttaaggtatacaatgccctgcgagaacaaaagccgtacagcctgccgccggtcaaaccgtataaagactatatcaagtggcttgaaaagcaggataaacatgcatcactgcattactggcgcgggtacttagaagattttgaaggacaaacgacatttgcggagcaaagaaagaaacaagagaacggctatgagccgaaagagctgctcttctcactgccggaggcggaaacaaaagcatttaccgagcttgcaaaatcgcagcataccactttgagtacggcgctgcaggcggtttggagtgtattaatcagccgctaccagcagtccggcgatttgatcttcggcacagtcgtttccgggcgtcccgcagaaatcaaaggcgttgaacatatggtcgggctgtttatcaatgctgttccgaggcgggtgaagctgtctgaggataccacatttaacggcttgctcaagcagctgcaggagcaatcgctgcagtctgagcctcatcaatatgtgccgctctatgacatccaaagccaggccgatcagccaaagctgattgatcatattattgtgtttgaaaattatccgcttcaggatgcaaaaaatgaagagaacagtgaaaacggctttgatatggaggacgtccatgtttttgagaaatcgaattatgatctcaacctgatggcttctccaggtgatgagatgctgattaagcttgcctataacgggaatgtgtttgatgaggcgtttatcctgcgcttaaaatctcagcttctcacagcgattcagcagctcatccagaagccggatcaccctgtcaatacgatcagacttgttgatgaaaaggaaagagagcttctgcttaccggcttaaacccgccggctgagactcatcaggcgaagcctctgacggattggttcaaggaagcggtgaatgtaaatcctgatgcaccggcgcttacgtattccggccagactctttcctatcgcgaattagatgaggaagcgaaccgtcttgcgcgccgtttgcaaaagcaaggtgcgggtaaagacaccgttgtcgcgttgtacacgaagcgctcgcttgaactggtgatcggcattctcggcgtattaaaagcgggagcggcttatctgccggttgatccgaagctgccggaggaccgaatctcgtatatgctgactgacagtgcggctgcctgtctgctgacacatcaggagatgaaagaaaaagcggctcagctgccgtatacaggaacaacactcatcatcgatgatcaagcacggtttgaggaacaggcaagcgatcctgcagccgcaattgatcccgatgatccggcgtatattatgtatacgtccggcacaaccggaaagccgaagggcaatatcaccactcatgccaatatacaaggattggtcaagcatgtagactatatggcattttctgaacaagatacgttcttatctgtttcgaattacgcctttgacgcatttacttttgatttctacgcatcaatcctgaatgcggcacggctcattatcgcagatgaacatacactgcttgatacagaacggctcactgatctgatccggcaggagaatgtcaatgtcatgtttgcgacaaccgcactttttaatcttctcaccgatgcgggagaggagtggctgaaggggctccgctgtgtgttattcgggggtgagcgcgcgtctgtgcctcacgtcagaaaggcgcttgagatcatggggcctggcaagctgattaattgttacgggccgactgagggaacggtgtttgcgacagctcacgtcgtgcatgatataccggattccatttcctcattgccgatcggaaagccgatcagcaatgcaagtatttatattcttaacgggcaaaaccagcttcagccgttcggagctgtcggtgaactgtgcatcagcggaatgggtgtatcaaaagggtatctgaaccgtcacgacctgacgaagcaaacgtttatcccaaatccgttcaagccgggagaaacgctttaccgcacaggggatttagcacgctggctgccggatggaacgattgaatacgccgggcgtattgacgaccaggtcaaaatacgcggtcaccggattgaacttgaagaaatcgaaaagcagctgcaggaatacccgggtgtgaaagatgcggtcgttgttgcagaccgccatgagtccggagatgcatcaatcaacgcctatctcgtgaaccggacgccgctttcagctgaagacgtaaagaggcacttgaaaaaacagcttcctgcttacatggtgccgcaaacctttactttcttagaagagcttcctttaacgacaaacgggaaggtcaataaacggcagctgccgaaaccggatcaggctcaggcggcgaaagaatggatcgggcctcgaaacgcgacggaagaaacgattgcacacatctggtccgagattctcggcagacagcagatcgggattcatgatgatttcttcgcgctcggaggccattccttaaaagcgatgacggcagcgtcgcgcattaaaaaagagctcggtacggacatcccggtgcagctgttattcgaagcgacgacaatcgcagacattgccggttatctgcttcacggtgaagaaaaaggaatgaaagatctcaccatcatgaataaaaatcagtctgacacactgtttgcgttcccgccggttctcggttacgggctgatgtaccagccgctggcaaaacagctgtccggctatagaatctgtgcgtttgattttatcgaggaagacaaccgcatcgaacgctacacagagctgatcaatcagctccagccggaaggaccggtcaagctgttcggatactcggcaggctgcacgctcgcctttgaaacggccaaacggcttgaagccgaaggacgtaaagtggagcggctgatcatggttgattcctataaaaaacaaggcgtcagcgacttggaaggccgcaccgtagaaagcgatgtccaggcgctgatgaaggtaaaccgggataacgaagcgctgaatgacgaagccgtcaaagaaggtctcgccaaaaaaacaaacgcgttttattcttatttcgtgcataccgtcagcaccggcacggtcaatgcggatatagatctattaacgtcagaaccggactttgcgatgccgccgtggctcgcttcgtgggaggaagccacgacaggtgaataccgtgtgaaaaaaggctgcggcagtcacgcagaaatgcttcagggagaatgtctcgaaaggaatgcggcatatttgctcgaattcctaaggaaggaacatccgaagctgacagcttcacgatagaaaaggaggaagcccgccaatggtccagctctttaaatcgttcgataccacggaaaaaacgcagcttatctgttttccgttcgcaggaggctattccgcatcattccgcccgctccacacctatcttcaaggtgagtgtgagatgcttgccgcggaaccgccgggacacggaacaaatcaaatgtccgccgttgaggattttgaacagcttgtcagtttatacaagcaggagttgaatctccatcctgaccgcccgtttgtcctgttcggccacagtatgggaggcatggtcgctttcaggctggcgcaaaagcttgagcgggaggggatttacccgcaggccgtgatcatctcagccattcagccgccgcatgttgaaaggaaaaaagtgtctcatcttgatgatgaaaaatttctcgcccatattatcgagctgggcggaatgccgcaggagttagtggagaataaggaggtcatgtcatttttcctgccttctttcaggtccgactaccgcgcgcttgaaagcttccgtccgtctgattctcacatgattcaatcacccgtccatatttttaacgggcggaaagataaaaaatgtatcaaagatgcggacggatggaaaaaatgggccgacaatcccgtatttcatgagttttcggacggccacatgttcatattaagtgaaactgaaaaagtggcggaacgaatatatgagattattaacaggagcactgcaggccaattgttataggatatgacagacagcattcgctgtctgttttttgtaacaaaatctgcccgtgagttttctcatttatcaaaaattttatgttatgatttgatggaatataattttgaagggattgtcgtacatgaatgatgcagcaaaagagctgaacagaacattatctgaagaaaacccgcacgtgcttcatatgctttctgatttgggcagagagttgttttatccgaaaggggtgctgacacaatcggcggaagcgaaagccaaggccggaaagtataatgccacgatcgggattgccacctcacaaggcgagtccatgcacttttcccatattcaagagacactgtccgcctataaccccgatgatatctacgattatgctccgccgcagggaaaagagccgctcagacaggaatggctgaaaaaaatgcgtctcgaaaatccttcattagccggcaaagacatcagcacgccgatcgtgacaaacgctttaacacacgggctgagcattgccgccgacttgttcgtcaatgaaggggatgcgctgcttctgccggataaatattggggaaattacaatttcattttcggtgtccggcgcaaggcatccattgagacgtacccgctttttcagcaggatgggcgttttaatgcggcggggctgtccgagctgctgaaaaagcaggaagaaaaggcgattgtcgtgctgaatttcccgaataatccgacaggctatacgccgggggaagaggaagcgtcagaaatcgtcagtgtgatcctggaggcagcggaggccggcaaagagattgtcgtgctcgtagacgatgcgtattacaatctgttttacgatgaaacggccattcaggaatccatcttcagcaaactcgcccaagtgcacgaccgggtgctttgcgtaaaaatagacggcgcgacgaaggaaaattacgcgtggggcttccgcgtcggttttattacgtacagcacaaaaagcgaaaaagcgctgcgcgtgctcgaggaaaaaacaaaagggattatcaggggaacgatttcaagcgccccgcatccgtcccaaacgtttatgctgcgggcgatgcagtcaccggaatacgagaaagaaaaatcgctgaaatataatatcatgaaaaaacgggctgacaaagtgaaagccgttcttgcagaaaacaagcactatgaagacgtatggacgccttatccgtttaactcgggttatttcatgtgtgtccggctgaaagacataaacgccggcgaattaagagtgtcgttgcttgaaaagagaggaatcgggacgatatccattaatgaaaccgatttgcgaatcgcattttcatgtgttgaagaagaatacatcgcggatctgttcgaagaaatttatcaagaagcaaagcagctgcagaaacaggcggaaatatcaggctgacaaaaaaaggagggggataccctcctttttctatgcttacatcagctcttcatacgttttcatctcaatcccgtcacaaaaatcgggatgcgccgcacaaacggccagcttatattcctcgtccgcatcatatgtgcggatgaaacaaggttcatgtccgtccgggagctcaatggacacatggccgtcgtctttgaggcggacgctgaatgaatcaagcggaagggaaagcccttttccggcctgcttgataaagctttctttcatcgaccacaggaggtaaaaataatcggtctgctgatcggggtgtttcgcttgcagatcactgtattccgtcggcgaaaaaaaacgtttggcgatatcaatcgtgccgggcttcattttttcaatatcaatgccgatcggttttgaatcaacggcacacacgatccagcgcccggagtgggaaatgttaaagtgcatgtccggaagcgcggggatgtacggctttccgtattcctggacgctgaatgaaatcgcggccggatcaagtccgtaagccttcgccgcagcggtgcggatcagcatgtcgccgatcaaggtgcggtgagcatcctccttatggtaaaagcgccggcatttttcccgcttttcggcggacacggccgccatcatccgatcctcttcccctgcagaaagcgggcggtccatatatactccgtaaatcttcatgtccagatcctccgtctgaaaatattgtcaaaaccatcctaccatatcagacgaaagctgtccgaaaataaaaaaacaaaaccgtttcggctttgtttttaatgaacggacgttgcccgcccggagatcgcgtatgttaacagtttagaggactgcggcaaagaaaaacgcagaatcagccccgtcaaaacagccgtaataatggttccggcgccgatcggtccgcccatcacccaggctgcggcaagaatcgtcagctcaatgccgttccgcacccattgcacgttccagcccgttttttcagatatcagcatcatcagagagtcccgggggcccgcgccgagccctgctgatacgtaaataccgacgccgcagccgatcagcagcaatccgatagaaaaaaacacggccgctaaggaaaaagcgtgcgcctcaggaagcagaaacgagaagaaatcaataaacattcccatcagcaccatgtttaagatagcgccgattttcgggagcgtcctcgtgaacaggcaggttaaagccacgatgaccgcgccgaccaagatggaccattggccgacagatagcccgaaatgctgaaaaagcccataatgaaaggcatcccaagggctgatgccgagagcttttcctttaatggttaacgataccccgaaagacaaaatcaacagaccggcaaaataaaacgtccagcgcatcaagaattcccgcttcaaagaggtcccttctttcataacattcattaattgtcattgtagcataaccgcccaaaaaaagaagaagcgaaatcagtgtttcgcttcttctccggctcctacaaaggattcagtatacgatttaaaaaccgctgcgtgcgttcttctttcggcgcggaaaaaatctgggccggcggtccttgttccacaatgacgccgccgtcaatgaagatgacttcatcggccacttcctgcgcgaatttgatttcatgggtgacgacgaccatcgtccagccttcgttcgccagatccttaatcactttgagcacctcgccgaccagctccggatcaagtgctgacgtcggttcgtcaaacagcatcagctcgggctgaatcgcaagcgcgcgggcgatgccgacccgctgctgctgaccgccggaaagctggaacggatataaatccattttgtctttcagtccgactttttccagaagctctatcgcttcttttctgacttgctccttgtcgcgcttttgcacttgaacgggtccttccatgacgttttcaagcgccgtgcggtgaggaaacagatgatacgcctgaaagaccatgcctgatttgcggcggaggcggagaatatcagcctgcttcacttttttggagaaatctattgaaaaatcggagaatgccagctcgccgcgattggggatctcaagcgcgttcagacagcgcagaagcgtcgtttttcctgaaccggacggtcccagaatggcgatgactttccctttttctatctccatatctatcttttttaaaatttcattctgtccgaatgatttatttaatcctttgacggaaagcatatcgaaacctccttatttggccacataacggtcgagacgccgttcgatcacatgctgtacgattgacagcaagaagcagatgatccaataaataaaggcggcttcaatatagatgaccaagatttgatcaaggttttgcgcgccgatttcctgcgcttttctgaacagctccgcgacgagaatctgtgacgcgagagatgtatccttgatcaggctgataaatgtatttgataatggcggaatggacacgcgaaacgcctgcggcaggatcacgcggaacaatgtcttgcgataggtcatgccgatcgtataaccggcttcccattgccctttcggcacggatgaaatagatgcccggatgatttcagaagcataggcgcccacgtttaatgaaaacgcgatgactgcgcttgggaaagggtccagcgtaatattaaatgtcgggaacagataaaaaatgatgaacaattgaacgagaagaggagtgccgcgcaccgctgatacgtatacgctgaacacccatctcaatggtttcatatttgacattctggcgagcgccgtaatcagcgcgatgatcattccgaaaataaaggaaagaatggtaaggggaatcgagtaatagattcccccggaaagaatcggccagaatgactgctgcaccaaatcccacggaatggctgttgcaatcacgggttccggcatgttacttagaaacatcttcgccgaaccattttttcgctattttagaaagagtcccgtcctctttcatttcttttaacgctttgttgacgtgagtcacaagttcgccgcttccttttcggaatgcgaaatatgtctgctgcggctggcctgcttcaaacgcgattttcacgtttttattgccggacgtttttaagtagttcagtacggcaagcttatcgttgtaagtcagatcagcgcggccctgctgaatgagctgaagggattgcgccatgccttcaacgccttcaattttcgcgccggcttctttcgctaatttattgtaattgcttgttaatgactgagccgctgtttttcctttgacatcagcctctttcgcaatcgtgctgtcttttttcgtcacgacgactgcatttgacgttgtgtatttatcagaaaaatcatattggttctcacggcctgttttgccgacttggttggcgacgacgtcaaaccgtttcgcgtttaaaccggcaaacatgctgtcccattgtgtttctttaaagtcagctttcagaccgaggcgtttcgcgacttcttgaatcacttcaacatcatatccggtcagtttgtcagtctttttatcatggaaggtaaacggttcgtacgttccttctgtaccgacggtcagtacgccttttttcttgacagaagcccaaagatcgccgtcttttgacttagatccgctgtcctgtgagtttccgcaggctgcaagcattgcgatgctgaccatcatgaacaaagcgaataatgcttttttcatcttctttattccccacttttctgagtagttttattgagaaaaaatagctcccaattgtaaaggataacttttttttagtatgagtcaagtaattggttttcataagcgggaattcatcgtgttccggatcaaaataattccaaaaactgtctgacaggcttcggcaggtagctgtcttttctccagatgacggccggtgtcatgacaaacgggttgtcttcgatgataaccgttttgacatgcgagcgcatatggacgggaatcatcgtcaaaggcagaattgtggcgccgaatcctgatgatacaaggctcaagagcgtcgcggagtcatggcattcacaaacaacctggaggtcgagaccgtactgttcacaaacttggaggacttggtcatacacacctcttccattgacggtgcgcaaaaggatcagaggcaaagaggcgatgtcattcagtttaatcgtttctccgcacagtcgttttgaatgctcggacagcaccaatacacacggaatgtcttcaagctccttcgattcaatgccgtcgtttttaatcaaggtggtggtgacggcggcgtcaatctgccgggtttccagaagctccagcagtgagacgggttcatcttcccaaatgttaaaggtgagatgcggaaaccgctctttcatctgtgacactttctcaagcatgagcgctgcgcagtaaatggttgacccgacggcaagtgtcccggccacctcctccttcagctcttgtacctcgattatagcgtcctcaaacttatgaagaatctctttcgctcttttcaaaaagacgtttccttcatatgtgagggtcatttgtttctttttattgcggtcaaacagaatgacgcccaattcttcttcgagctgtttcaactgtcggctcaaaggcggctgtgccatatggagctttttggcggccgtcgtgattttctgctcttgggcaatggtgatgaaataacgcaattgccgaatatccatgagaacgctcgctcctttcttttatacctttaaggtatgatacatagatttaacgaatatttttcatatggatatatcaggagtatgatggatttgacaccacatttcaagcgtaaaggagggtcaatatgaagctcgtcatcggaatgaccggggcaacgggagccatattcgggatcaggcttttagaatatttaaaagccgcggagatcgaaacccatcttgtcgtgtctccttgggcaaatgtcaccattacacatgaaaccgattatacgttaaaagatgtcgagaaactcgcatcctatacgtattctcacaaagaccaggcagcggcgatttcaagcggttcgtttgaaacggacgggatgatcatcgctccgtgcagcatgaaatcactggcaagcatccgcaccggaatggctgacaatctgctgacaagggcggctgacgtcatcctgaaggagcggaaaaaacttgtgctgctgacaagagaaacgccgctcagccaaatccatttagaaaatatgctagcgcttacaaaaatgggttccgtcattcttccgccgatgccggcattctataacaagccggctgacatggatgaattgatagaccatattgtgttccggacgctcgatcagttcggcatccgtctgccggaagcgaaacggtggtacggaattgaaaaacaaaaaggaggaatctgataatggcctatcaggattttagggaatttctcgccgctcttgaaaaagaagggcagctcttaaccgtcaacgaagaggtaaaaccggagccggacctgggcgccgccgcgcgtgcagccagcaatctcggggataaaacccctgcgcttttgtttaacaatatttacggacatcacgatgcgcaggtggctctgaatgtcatcggctcgtggccgaatcacgcgatgatgctcggcatgccgaaagatacgcctgttaaagaacaattctttgagtttgccaaacggtacgatgcatttccggtgccggtcaaacgggaagaaaccgcgccgtttcatgaaaatgaaataacggaagatatcaatctatttgacatccttccgctattcagaatcaaccagggggacggcggctactatttggataaagcgtgcgtcatttcccgcgatcttgaagatccggacaatttcggcaagcagaatgtcggcatttacagaatgcaggtaaaggggaaagaccgcctcggcattcagcccgtgcctcagcatgatattgcgattcatcttcgccaagctgaagaacgcggcgtgaatcttcccgttacgatcgcgctcggctgtgagccggtgattacgacggctgcatcaactccgctgttatacgatcaatccgagtatgaaatggccggcgcgattcaaggggagccctacagaatcgttaaatctaaattgtctgatttagacatcccttggggtgctgaagtcgttctggaaggagagatccttgcgggagaacgggaatacgaaggacctttcggtgagttcacgggccattattcaggcggccgcagcatgccggtgatcaaaatcaaacgggtatatcatagaaacaatccgatttttgaacatttatacttaggcatgccgtggacggagtgcgattatatgatcggcattaatacgtgcgtgccgctttaccagcagctgaaggaagcctatccgaacgaaatcgtcgccgtgaatgcgatgtatacgcacgggctgatcgccattatctccacgaaaacgcgctacggcggatttgccaaggccgtcggcatgcgcgccctgacgacgccgcacggactcggctactgcaaaatggtcattgtcgtggatgaggatgtcgatccgtttaacctgccgcaagtcatgtgggcgctctcaacgaaaatgcatccgaaacacgatgcagtcatcattcctgatctgtccgtccttccgcttgacccggggtctgatccggcagggatgacacacaaaatgattcttgacgccacgacgcctgtcgcgccggaaacaagaggccattattcgcagccgcttgattccccgctgacaacgaaagagtgggaacaaaaactgatggacttaatgaatcaataagaaaggatgagtttactatgaaaacatgcccgcgatgtgaatcgcaaaaaggagaaaccgtcagccaatcgccggtcaaaggcgcttgggaaatataccaatgccaaacctgctttttcacatggagatcctgtgaaccggaaagtatcacgaatccggcggcattcaacccggcatttaaaatcgatccgaaagaaacagagacggccacacatgttcccgctgtcccggaaagaaaagcgtaatgctgacggagcacttgccggaggcgctttacgcgcttttagacggaacggaacttgaaaaaaagcagcacgacgcatttgtgctccaatccgtgacaaaagaaggccgtccgcacgcggccatgatcagcgccggtgaaatcgcggccgtgagcagaacaaatctccggctcgccttatggaaaaacacgacgaccgtaaaaagcctgctgcattcgggacaagctcttttcatcgcctggcacggaggagccgcatattacgtcacattggaatgtaaggcgcttccgccgttgaaagaggcgaaacacgagcgggaacggttcagctgccgcgtgatcaccgtcaaggaagatcgggcgaaatacgcggatctgacatcaggaccggccatccagctccacgaaccggaagatgtcctgaagagatggagagaaacacttgaggagttaaaacgatagacgcacaaaaaaagcctgcggacgattccgcaggcttctcttttattgtacgcctttcatcgcccgtttaatgacgggagacagaagaattaaaataataccgagaatgatcgaaacaagaccgattgagccgaagtaggccgcttcagaaatcttatcaaacaaaccgactacttttgcgttcagggcttgaccgcaggcgtttgttaaaaaccacatactcatcgtctgcgctgagaaagctgcaggcgcaagtttcgttgtgacggataaaccgaccggtgaaaggcaaagctcaccaagcacaaccaaaaggaagctgagcacaagccaaagcgggctcacaagctcgccgcttccgcccataaccggaagcaccatgactaaaaatgataatccggcaaggataatgccgatcgcgaatttaatcggtgttgaaggctggcgtttgccgagcttcatccagatccacgcgaacaccggcgcgaaaataacgatgaataatgggttcagagactggaaccatgaagactcaagatgcatgcccgcaaaggaaagtctcgtgcgctgatccgcatataaagctagaatcgtcgcgccctgctcctgaatcgcccagaacattgccgctgcaataaacagcggaacataagccgcaagccgtgatttttccgttttcgtcgcttttttgcttgtgaacatcacgataaagtaaataaccggaatgacaatgccgaggatactgacggtgtcaatcacacgctggatcgtcagccagccggtttgaatcagaacaataataacggctgctgcgatgaccactccgattcccgtgccgatcactgatgatttagaaatcggattcggtacattggagcctgctttgccgaggtatttctttctcgttagagcgaaaacaatcagtccgaggaacataccggccgcggcgcatccgaagcctaagtggtagttgtacttctgtccgagtgttccgacaattagcggcgcaagcaatccgccgaggttgatccccatgtaaaagatgctgaaacctgagtcgcggcgctcgtcttccttcgtatataaatctccgacaacgctggatacgtttggtttaagcaggccggttccgataatgatcagagccatgctggtaaaaaacgccgccgtgctgccggggaaggcaagagcgatgtgcccgaacataattaaaattccgccgtaaaatacggtgtttgccgtgccgaatacccggtcggccagccatccgccgatgacgctcgacatatatacgagagatccgtatatggacatgatggcaactgcggtcgttttatcaaagccgagaccgccatgagcgacttccgtgtataaatagtaaagcaatatggctctcataccatagtaggagaaacgctcccaaaattcggtaaaaaacagtgtgaacaagccgcggggatgaccgaaaaagcctcgttgcggcacagtttctgttatagattccttatcaatagatgccacctgagccaaccctttcttaaaaaagtgtattacaaaaatcatattcttatataatacttgtgtcaatataatttatactgaattcaaaaaattccagaatgaaaagatattaaaacggtgaatatagacgaattttcctgattccaatgacttattttgttatattatctgactaaactatctttataaacttttttaataaaatttaaagtatgtacaggcggagcgggatatggcggaataagatgacaataagagaggaaggaggagattatcacttgccgaatcgtatattggatattacggattgcggtgtggcggcagacggaaaaaccgatgtgacgggcgccatcaaccaatgcttggccagagccgtcagcgaaggctgtcatacggtgttttttccgcccggaacgtataaaatcaacggcacgcttggcggggacaaaagccagccgtttcggaacgccgggattaacgtgccgagccatctcaccatcgttttagatccggaatgcacgattaaagtggcgccgaacagctcctggggctactcggctttctatataggcaggcgtgaaaatgtcaccatcaccggcggccggatcatcggggaacgggatgaacacacgtataccaatgtccctttgcggtcgacccatgaatgggggtttggaatctgtattgaaggcagcagcaatgtgctgatcgaaaatgtgaagatttcagattttacgggagacggtataattgtcagcccgctcgggttaaaaacaaacagtgattacgaaacttcagaacaggtgaccatccgccgctgtgagatcaggcagtcaaggcggaacaacatttcaatcaccggctgcaataccgttacggtggaagaatgcgtgattgaagacgccgggcaagggaacggaacggctccgaaattcggaatcgatattgaatcgtacggagaaggcgatattgattatgaagaagctcttcatattacggtccgcaacaacttcttttccggaaacgccgcaagctcagtcaccaattttaacggatataatgtgttaattgaaggaaatcattccgataacacaatcagctacgggtatggggcgcataccgtcattacggggaatgtcttctttcggtcagacggcggctcaaggaccgcagtcgccggacaaggtgtgtcacaaggacaggacagcagcagtgccgtcatttccaacaatctgattaccgggttttccaccggaatagatgtaaggggaaaaagcgtcctcgtcacccacaacaaaattaatcaatttgaaaatacgggcatttccgtctatcaggcagaagatgtgaccgttgacggcaatgtcattgaaaacggacgttccgaaacgagacgaagcacggggatgcgggcgacgctttcggagaacgccgtctttacgaataacactctgaatcaggtgacagacggaatcagcatgtcggccggcagtatcattgtaaaacaaaatgtgctgaaatcgttcagccggggcatatgggtcacaggcggaaatgccgttattgaaggaaatacgctccttccgaatgcgtatcagggcgccgcggagtcctatgccgtatctgtgacaaatgacgccggggctgtcatcaaaggcaatctctttaagaactataaaaactatcccgtattcagttcaacatcctcgggaacctctgtcatcagcaaccgctttgaatcatcaccgcttatcgttaccgtgtatctgaactcaggcacgcatgaagtcatagacaatacgctcacgatcaaccgaacagcgggcagcccgatcggcatctatctgaacggagcctccaattccctcgtttcgggcaataccatcaacaacctatccgccgcttctgcttccgccatccaaaccagctcctccgcaagtactaaaatcatcggcaaccgcattatcaaaggcgtcattgtgaagcacgcgacagatacggaaagcggaaatatcgtcatctgagaacaatctgcgccggaaaaataaaaagaacacatgaactccgagagaaggaggaatgtgttcttttttgacacaatacagccttgcgcctgtcaggcatcttttttacctgatttatataaagcgatcatttctctgattaaaaagagggcgaataaaaacagcatcagccattctgagaaggtggtcaatttaaaagcggacaggttgttttgaaccgctccatagaaactgaaaccttgcagcatatccaccgttactgaaatgatcagacaggcagtcagcaaaaagaatgaaacccctaatattttcatgcgcatcactctccctttttatccttttcgattacgcagaacttatacagactttccgccgtgcataatcttttgccgtacaggaagaatatgaaaaaaacgaggaaaggttttttgcgatatgccgccattttttaagcagaggaaacaaaaaaaagccgatcaaaacgaccgtgacaatgaaggcagaaaagaagcggacagccagccggacaaagagcgggatgagccgatctccctcagcttaaagcaaaatatgaagaagctgtctgagaggttcggcaacagtgccgatgtcgtcatccgccggctgaaaatcggaaaagaagagcttccggccgcaatcgtgtatatcgccggtttggtagacgaacagcttgtcagccaatcccttctggaggatttaatcgatatcccgtccgttcagccggaacaagcggtctgcctgatatacgataaaacgcttgcgatcggcggggtgaaagaggaagaaaaatggaaaagcctttatgccgggctggtggcgggcagcacgctcatttttgtcgacggggctgacaaggcgctgatcgccagcacggaagggggagagcaccggtccattcaagagccgagcactcaggtctctttccgcggcccgcgccagggattcactgaatctctgcaaaccaatatttccatgatccgcaggtatgtaaaaacgcctgatgtatgggttgaaaaaatggagatcggacacgaaacgaatacggatgtcgcgctgatgtatattaacggaatttgcgataaaaagctgattaaggaagtccgcaagcggctgaagcacattgacatcgacagcatcctggaatccggctacattgaacagctcattgaagacgcgccgttttctgtgttccccaccgtatatcatacggagcggccggacgtcgtggcggggaatctgctggaaggacgatttgcgattatcgtggacggaacgccgttcgttctcatcgcgccggccttatttattcaattttttcaatccgttgaggattattattcacgatttgatatcgccacaagcatcagggtgctgcgggttttgattttcttcatttcactggtggcgccggggatttatgtggcggcgacgacctttcaccaggaaatgattccgacgcagctgctgattgtcatcgcggctcagcgggagacggtgccgttcccggccgtgattgaagcgctgacgatggaagtggcttttgagattctcagggaggcgggtgtccggcttccgagagttgtcggctccgccgtttccatagtcggagcgcttgtcatcggccaggccgccgtacaggccggcatcgtctccccggccatggttatcgtcgtcgcgctgacggcgattgccagctttgcgaccccggcttttgacatggcgatatccgcgcggctgatccggtttctctttattctgtcagcggcggtcatgggattttacgggctgattctgggcattatcatgatgttcgtccatctgtgcggcctgcgttcattcggttttccgtatatgtccccgctcgctcctttgaccccgggcgggctgaaggattccatcctccgcgctccgttatgggcagatgaaaaaaggccggaactgctcgtgcaggaaaacaacaggcgccaaggggaacatcaaagaccgaaaccggagacatccagagggatggttaataaagatgtagaagagggcgacggtaatgaaaagacgtaaatggatacttatcctttgtacgatggtttcccttatgtttgtatccggatgctgggataaaagggagctgactgatttggctgtgatctccgccatcggtattgaccggaccgaaacgggaaaatacgtccttcacttgcaaattatcaatccgggaaacgtggccggcggtctgcagggcggcggagcgggagaccggcctccggtttccgtctattcggtgtccggagacaatatgacggaagctttgagaaaaggctcgatgaaagtgtccagaaggctctattttgcgcatacgaatctcgtggtgttcagtgaaaagctggcgaaagaggaagggctcagttttattctggacaatcttgaccgcgacaccgaattcaggacgaccgcaaccgcggtgatcgcgcataattgcaaggctgaagacattattaaagtgctgacgccgattgataaaatcccttccaataaagtgaacaagacgctcagcttcacgcaggaacaatacggcagagtcattaaaaccagccttcaggacgttctgattgatctcgcttctccggccgggtcgccgtttattccgggttatgaaatgcacggagacgataaagccggtcctacgatggaaaatacgcagacgactgaaccgaaagcagtgctgtcagcggacggactggcggtgttcaaaaaggatgggaggctggattactggattgaggatgacgacagtgtgggggctgtatggctgctcaataggatcaagcatacgttcatcaatgcggattggaagaatgtgaagcacgcaatcagtctgcaggtcacccgccagaatacaaaggtgacggccacttttccgaacggaaaaccgcatattcacgtgcatgctcaggtcgaggggctggtggacgctgtcagataccctttccatctgtctgatccgcaagtgctgatgacgatgcaaaaggcgctcagcgtgcagcttgacaaagatatcaccaaatcaattgaagatataaaagcccgtaagaatgacttcgtcggcttcggagacctgatctatcggaagcatccggacaaatggaaaaagttcaaagggaagtgggatgaagaatatttccccaatctccccgtagatgtcaaaacggaagtcattatcagaagaacgggcttgcggaataatcctctctcagacaagcttgagcatgattgatttgaggagaaaggagcgaagcgtatggaaaatgcgaaaatcggcacgcgtcagctgtttattatgatcattttgtttgaattgggcagttcgttattgatcccgccaggcacgatggccgggcgggatgcatggctgtccgtgcttctcgggtgcgttatcggtctcggacttttctacgtttatcaggcgctgtatcaattttttcctgagtcttctccgagagattacatgaacgaactgatcggcagacatctgagctgggcggtctcgcttctttatattctctatttttcttatatcgcggcccgcgtattgcgggattttggcgaaatgcttgtcaccttcgcctaccaggacacgccgcttttaattgtgaatgccatgctgatgatcgccgcgatatttgcggtcagaaagggtattgaagtgatagcgagagccggcgagctgctgtttggcattatgtattttctgacagccgtcgggctgatcctcattatcagctcaggcacgataaacctcagatttctccagcccgttttagcggagggtgcaggaacggtcatttattccgtgtttaaacagacgatgttcatcccgttcggtgaattaatcgtgtttgtcatgattttcccttatttaaaagatcggaaaaaggtgaagaaaaccggatttctggcgattatcatcagcgggctgtttttggcgatgtcagtggcgattaatatttgtgtgctggacgtcaacttaatgctccgctctcaatttccgctgctgagcaccatacagacgattaaagtagaagagtttttagaccggctggatgtctttttcatgctcgtgctcgtcatcggcggttttttcaaagtcagcctttttacatatgcggttgtcgtgggtgtgtccacgctgtttaaagaaaaaaatccgtctcagctggcctttccggtcggattgggggtgctgattctctccatcagcatcgcaagcaatttttcggaacacatgaatgaaggcttaaacattgtgccgatctatattcatcttccgtttcaagtgctgtttcccgttttgctgcttatcattgccgttattaagaaaaaggtcaaagggaccgtctatacagtttcgaagaaataacccggacggtgcgccgggttatttttaaaatcatgatttttgtcttaatgcattgacaaacttgcgtgacaattgtacattttgatttattcttataaaattactaggaaatataggtttagtggtgttaatattttccgaaccgtatttcagaatagaaggagatccatcatgacaaagaaaaaagaaatcaaactcggtgtgtttctcgcgggcaccggccatcatgtcgcttcttggagacatcctcaggcaccggcggacgcgagcatgaatttggattatttcaaagaactggcgaaaacggctgagcgggggaaattggacatgctgtttttggcggacagtttatcaatagacggcaaatcacatccgaatgtgctgacgcgctttgagccgtttacgctgctgtcggcgctcgctcaggtcacatcccgcatcggtctgacggcgaccgcgtctaccacatacagcgaaccgttccatatcgcgagacaatttgcatcgcttgatcatctttccaacggccgagcgggctggaatgtcgtcacatcttcgattgaatcgaccgcgcttaatttcagcggcgaaaagcatcttgagcaccatctcagatatcagcgcgcggaagaattcgttgaagtcgtcaaaggattatgggattcgtgggaggaagacgcctttatccgtgacaaagagtcaggagcatttttcgataaagaaaaaatgcatgaattgaaccataaaggaacatatttctccgtgagagggccgttaaatgtcgcccgcacacctcaagggcgcccggtcattattcaggccggatcatcaggagacggaaaagcgctggccgccaaaacggcggaggtcattttcaccgcgcaaaatcatttggagtccgcgcaggaattctatcaatctattaaagaacaagcggcttctttcggccgtgatcctgaaaaaatcgcgatcatgccggggatatttcccgttatcgccgataccgaggaagaagcgcaggcaaaatatgaagagctccaagatctcatcattccgtctgtcggcctgaacattctgcaaaactatctgggcggcgtcgacctttccgcctgcccgcttgacggcccgctgcctgaattggatgcggatgcgtcgaatgccgttaaaagccggttcaagctcgttcaggagatggccaaacgcgataacatgaccatccgcgagctgtacaaatatgtggcgggttcaagaggccatcatatctttgtcggaacgcctgaacagcttgccgataagatggaagaatgggtcggaaaacaagcttgtgacggcttcaacatcatgccgccgcttttgcctgaaggtctcactctttttgtagacaaagtgattccgattttgcaagaacggggcgtgttcagaaaagagtatgaaggaaccacactcagagaacatttcggactggaaaaaccggcaaaccgatatgccgactaaaggagggctcatcatgtcaagacaataccggctcgcaacggaggcagacgctgatgagctgctttcactgacactgcgggcgtatgaaccgatccgcaagctcggcatcaactttgccgcagcaacggcggataaggagctcgttttgaataacatacaaaaaaacgcctgttacgttttggaggaagacggacggattctggcgacgatttctctgcggatgccgtgggggccgaatcccgggccgtacggtgtccctcatatttggtggttcgccgtcgatcctgaaaccggaaaaaaagggacgggctcagacatgctggagtggctggagaacacagtgctccgcgatacattaaaagcgcctttcgtgtcactgggcacagcggacaagcatccgtggctgatcggcatgtacgagcggaaaggctacgtccgcgcaggcgaaaaggatttaggaaaaggccacatcaccatctatttaaaaaaacaattgcaggattaacattttaataggaaaaggcgggatttcaatgaagaagaaaacatgggctttgctgctgtctgccgcgcttttggcggtcttaacagcatgcggaaacggaaaagaaagcgaaggcggcgataacgtgctgcatgtcggcgctacgggacaaagctatccgttcgcatataaagaaaacggcaagctgacaggctttgacgtggatgtaatggaagccgtagcgaaaaaaatcaacatgaaactggactggaagctgcttgagttcagcggactgatgggcgagctccagaccggcaaactcgacaccatttcaaaccaggtcgctgtcacggacgaacgcaagaaaacgtataacttcacagaaccgtattcgtatgcgggcactcaagtcgtcgtcaaaaacgataacaaagacatcaaatcagtcaatgatctgaaaggaaaaacagtggcggccgttctgggctcaaaccacgcgaaaaaccttgagagcaaggacccggataaaaaaatcaacataaaaacatatgaaacacaagaaggtacgctgaaagacgtggcttacggacgggttgacgcctatgtaaacagccgcagcgtcctgatcgcccagatcaaaaagaccggtctgcctctgaaattagcaggagacccgattgtctatgaaaaagtcgctttcccgtttgcgaaagatgcggctcacgataaaatccgcaaaaaagtaaacaaagccattgaagacctgcggaaagacggcacgctgaaaaagctgtctgaaaagtactttaacgaagatatcacaaaggaagcaaagcaataagaaacggcggtgaaaatcgagaatgaacagcattgattggggatttatgttttcagcttttcccgcgttaatcgaagccttgccgatcacattactaatggccgtcgcggccatggtatttgccgtgatcggcggccttatattagcgcttatcacaaaaaatcgtattcctgtgcttcaccagctgtcaaaggtgtatatttcatttttccggggcgtgccgacgctcgtgcagcttttcttaatttattacggcctgcctcagctctttcccgggatgagcaagatgacggcgttaactgcggcgattatcgggttaagcctgaaaaatgccgcctacctggctgaaatcttccgcgctgcgctcaactcagtcgatgaggggcagcttgaagcctgtctgtctgtcggaatgacaaaatcccaggcgtacagacggatcattttcccgcaagccgtcagaaacgcgcttcccgcgacgggaaatacgtttatcggcctgttaaaagaaacatcgctcgcttttacattaggtgtgatggagatgttcgcccaaggaaaaatgtacgcatcgggcaacctcaaatattttgagacgtatttagccgtcgcggtcatgtactggattcttacgattatttacagtgtgctgcaggatctgctcgaacgggcgatcagcaagccttatcgcacataggaggaggctcaggatgatacaagtcagacatattcgaaaagcatttaaagatcttaccgtacttgacgggatcgatcttgagatcaaaagcggcgaagtcacggccatcatcggcccgtcaggctcgggaaaatcaacgctcctccgctgtctgaatctgctggagcgcccggatgacggcatcattgaaatcggcgatgcaaagctgaatgcagcgtcctattcgcgcaaagacgtacacaagcttcgccagcagacggcgatggtgtttcagaattacaacctgttcaaaaacaaaaccgccctgcaaaatgtgacagaggcgctgatcaccgcgcaaaagaaaccgaaaaaagaagcggaacagatcggtatggacctgctgcggcaagtcggtttagaacacaaagcggacagctacccgattacgatgtcaggcgggcagcagcagcggatcgggattgcgagagccttggccgttgatcctcacgcgattttactggatgaaccgacttcagcccttgaccctgagcttgtagcaggggtgctccaagtcatcaaatcaattgccgaaaaacagacaaccatgatcatcgtcacgcatgagatggcttttgcgcgtgaagtagccgacaaagttatttttatggcggacggacgcatcatcgaacagggaacaccggaggagctgtttgacaatccgcagaacgaacggacgaaaaaattcattaagcaagtgggagagcctgccgaacttgtctaagaagggaagaagaagaaatggcaaatgaaacgtatgaatcattaaacaaacgtttaatcaatatccgccgcgaccttcatgaacaccctgagctgtcaggcgaggaattcgaaacgacgaataaaatccgccgctggctggaggaagaaggaatcacggttcttgatgtgccgaaacttcaaaccggagtgatcgctgaaatcaaaggagataaaagcggccccgtcatcgccgtcagagcggacatcgacgcactgccgatcgaagagaaaacaaaccttccgtttgcttcgcgcaacagcggcgtgatgcacgcatgcggccatgatttccatacggcatctatcctcggcacggctttcttattaaatgagagaaagcatgagctgaaaggaacggtgcggtttatttttcagcccgcggaagaaatcgccgccggagcaagacaggtcattgaagccggcgcgcttgacggtgtatcggcgatattcggcatgcataacaaacctgacctccccgtcggcacggtcggtctgaaagaaggcccgcttatggcgagtgtcgaccgctttgaaatcaccgtgaaaggaaaaggcggccacgccggaatccccgacaacagcattgacccgattcaggcgacagggcagatcatcggcggcctgcaatcgattgtcagcagaaacatcagctcgcttcacaatgccgtcgtcagcatcacaagagttcagggggcagttcttggaatgtcattccggaccatgttgaaatggaaggaaccgtccggacgtttcaaaaagaagcgcgggacgctgttccgaaacatatgaagcgggttgccgaaggaatcgcggccggattcggggcagaggctgacttccgctggtttccttacctgccgtcagtgatgaacgatgcccgattcatacaggcggcggaacaaacggctgaaagcctcggacttcaaaccgttcgggcagaacagtcgcccggcggcgaagacttcgcattatatcaagaaaaaatccccggcttcttcgtctggatgggaacaaacggaacagaagaatggcaccatccagcctttacactcgacgaaaaagcgcttccgaaagcggctgagtttttcgcccggcttgccgtcaatgtattggagcagacggaatgaatacggaaaatctgacggccggacttgctcaggccgtcatgtcgtctgtgccggaaacatccgccgaagcgatgaaagaagcgcgcaaaggactgcttgattttacagcggctgcttttgcggggagacgggatacaggagttgaaaagctggtaaaactggccgaagaagaaggcgggatgccgatagcgccgcttatcggcagaaatcaaaaaaccacgccgtcccaatccgcgctcattaacggcttcatcgcacatgcgcttgattttgacgatgttcattctgatgtaagaggacatccgagcgcggtcatcctcccggctttgattgcagccgcatcagccggccggatagacaagagccgttttctcggtgcttatgtgacgggaatcgaagtgatggcgcggctcggcgagtcagctggaagggatcattacgagaaaggctggcacaatacaggaacgttaggtgccatttcggccgcatgcgccgtcggattcgcagagaatctgaatcaaacccaattacagaaagcaatcgggtttgcggctgcccgttccggaggcatgagagtgcaattcgggacagaaatgaagccgctccacgccggcctggccgctcaagccggggtgttcgccgtaaagcttgcaaaggccggtttcggcggctcagctcatgcgctcgacggggagaaaggttttttcggactgtacggcgatcttgaacgggcagaaaccctgcttgtaaacgggtggggaaacccttggcggatcgtgagtccgggactttggtttaaggtttatccgttttgctcggcggcccatcatgcggcggacgccattctcaagctgaaggccgaacatggtctcactttcggccaaacggaacggattgacgtgatttatccgccgggcggggacgccgcattgacagaacggcgtccgaaaacaggcgaagcgggtcggttcagcgtagaatatgtgatcaccttagctttgcacggtaaggatttttcagttgaacatttcacatccgagccgattccgcaatcccttcaaaaaggatttgagcggattcaccgcagctgcgatgaccaaattcagccggctgacaacgccgttccgaagggccgttttacaattgtacgggtcacggtttccggcggtcatgtctatgaagcacgtatcgactgtccgaggggagcgccgggaaacggtctttctgaaaaagacattgaagacaagctccggctcgctttgccgggagaagagaaaaaggcggaagaattgatcaaagcagccggacaatcaaatattgaccgttatttacagctgatataaataaaaagagcgaggggatgcagccctggctctttttacgttcacttctattgaatagggggatatagggtgcgcccctgtctgcgctggcaggggcgcggtatcaggaaacggccgtgccgttttctttgaccgtgaaacttcctcttgataagcggatgttgatatcagacactttggcaatttgttcgtcgtgcgtaaccatgatgacgcatttgccgtctttatgcgccagatcctgaaagagccggacgatttcctttgacgtatcctcgtcgaggtttcccgtcggctcatccgcgcaaatcagatccgtgtcacagcagaaagcccgcgcaattgaaacgcgctgctgctgtccgccgcttaatgtcagcacccgctgacgggcctgctgttcggtgatgccgactttatccagcatgctgagcgcggacgcatctttgttgttctccttagatccggtaatctccatcgcggttgtgacgttctggagcgccgtcatatacgggatcagatgatgagattgaaagacgatagagacatattgatttctgaatttggttaatccgattttgaagatgtcttctccgttataaaggatgcttccctctttaggtgtgtcaaggccgcccgccagagacagaaacgtggtttttcccgttccggaggcgccggcaattgtataaaacttccctttttcaaagctgatcgttatatcctgaaacagcggctgtgatttatcttggtaccagtagccgatctgttgaaaggttaataggctcattatgctgcctcctcttattcctgcttggtcaggatcgttttagggtgaagccgcatgactgatacagacggcagtaatgtggcgatgacggcaattgcgacgccgatcccgccgagaatcagaaggtcattcagcgaaacgtttacctgcattgtactgatgacatctgcaccggatgaatgctgaccgaacatgccgtctccccgcggcatttctcctccgccccagccgcttgtttgctgctgggaatcatcggctgagctgacctgctgggaaagaagctgatttccgagctgattcgccacaaggctgcccgtgacggatgcgatcccgatggcgataaccgcgacaatcagaatttccgttaagaattgtccgatgagcttccagcgcttttcgccgatcgccatcaagacacccatttcatacttgcgttccctgatcgacatcatcacgatcaatccgagaatgaccgcgcccgcgatggatacaaggtacaccacgtttttagaaaatgacgcgacattttcaatcgggccggccatttgctgatacacctgatcatttgtcgtcagcgtgtaggttttatcatctatagatgtttttttcgcagccgcaacgaatgagtcaatatattttgcatcatccatataataaacggctgagctgattctgtttttgttatcagacccttttaacgccgcagctgcggtgtaaggcgtatagattttattgtcagggtttaagaatgaaaaatgctctgcctgatcgtctcctgatgatgttgttttataaattcccacaattttaagctttgtactcacagaatcatccgctgctgaggaaactgtaatggagccgccgaccttcagcttgttttgatctgccagcgtttcattgatcactgcgacttttgcgtccgcatctgtttttgtgatggcgcggccatcagtgatttttgagctcccgcctgtgaaatcatcaagcagcgccgtagagagcacgccttcgaccgaaatatccgctgaaatcatctgtcttccgccgccttgaaaacggcttccgccggaactgttatcggctgattcgtctgagctttttatcgcgtcaaagctttctgcgtttgctgacgctgtcgtgaggaagttgtaatttttaacgtgctgtaaagatgtaagtttcttggcatccgagacggaaatcggcgttgattcaaacgtcctcttttcaccgtctttttgctgctgcgccatttgcttttggcggtcagcctggagtgtgacgctcccgccgagctgctgccttgccagttcgcttgatttctttgccgctgactggatcgtaagaccggacaggacaaaaatgcaaatcactgaaaacacaaccagctgcaaaaacgtttttcccttttttgccttcatgctccaaaaggctctttttataaagttcatgtctgttcctccgtgtgggtgtcagatcttgtaaaaccagccttctttagaaccggttatccgatatgtatatagtaggagaaatgtatgaaaaaaatatgaacaaactatttccgggtgatgaaataaaaactaacaattgtgaaacgcgaaaatatccgggtaaaatggtgctattataagtaaaagcgtcaagataaacggaggacccaatgaagatattaatgatagaagacaatataagcgtatgcaccatgacggaaatgttcttttttaaagaaggatttgaagccgaatttgtccatgacggagtggaaggctatcagcggttcacggaagaggactgggatttggtcattctggatattatgcttccatctatggacggagtgacgatctgccggaaaataagagagacgagcagtgtgccgattattatgctgaccgcaaaggacacggagtctgatcaggtgatcgggtttgaaatgggagccgacgactatgtcaccaagccgttcagcccgctgacgctagtagcgcggattaaagcggtgatcagaagataccgggcgacggggcaggccgtaaaaagcggcgacttgatcgaaacggcgtgtttttcaatcaataagaagacgcgggaagtgtttctgcatggaaagcctgtcgagaatctgacgccgaaggaattcgatctgctcttttatctcgcacaaaatccgcgccaggtcttttcgagagagcagctgcttgagcaggtgtggggctatcaattttacggcgatgaacgtacggttgatgttcatattaaacggctgcgcaaaaaactgtccagtgaggaaaaaccgtttttatacacggtgtggggggtaggatacaaatttgatgaggattaaatacttatatcagctgctgttaagccatgtcagcattttgattttggcctttttcattatcatttccctgttttcgcactttgtgaaagattttgcgtatcaaaataaagtggatgagctgtcttcttacgcccagcagatcacaagtgagctgaacggacgcgatcttgatctgcgccgcctgtatccgtatcaggacatgttaaaaacgcgcgagaccaggtttattatttttgatgaacatcagcggccttacttttttcctgacgatatgccgccgcgcgagaagctcaaaagtaaagagtggcacatgctgaagcaagggaaaaccgttcagatcagagcggagatgaaccgttttaatacggagggcttggaagtatcgcttgtcgcaaaaccgcttttgatcaacgatcaatttaaaggcgcggtgctgctcgtgtctcccgtcagaggggtcgagcagatgatcagccaggtcaaccgctatatgatttacgcgattatcagcacccttatcatcacgattctgctgagctggcttttatctaaatttcacgttaagcggattcagacattgcgggatgcgaccggaaaagtggcatccggggattacgatatttcgctcaagaacagcggcggcgatgaaatcggcatgctggcgtccgatttcaacatcatggccaaaaatctgaagcaatcgagagagcagattgaccgcctggaaaaacggaggcgccaatttatcgccgatgtctcccatgagctgagaacgcctttgacgaccattaacggacttgtggaggggcttaacagcaacaccatcccggaaaaagataaagagaaatgcttctcgctgatcagtgaagaaacgaagcggatgctcaggctcgtgaaagaaaatctggattatgaaaaaatcagatcccagcaaatcaaactggacaagctcagtctgccgctcatcgaggtgtttgaaattattaaagagcatctcaatcagcaggcggaggaaaaacaaaatcagctgcggattcaggcggaggacggcgtcaaagtgttcgccgattatgacaggctgatccagattctcgtcaacatcacgaaaaacagcattcaatttacgcaaaacggagacatcacgctgcgcgggtatgaaggctataaagaaacggtgattgagatcgaagacaccggaatcggcatctccaaagaggaaattgagcatatatgggagcggttttataaggcggacgtgtcccggacgaatacggcatacggcgaatacggactcggcctgtccatcgtcaggcagctcgttgaaatgcacaagggcacgatagatattgccagcgaaaaaggaaaaggcacgacgtttacaatccgccttccgctgaatacgatacatgaatcatcttgaaaccggcagtcccgtctggctaccggctgttttatcttcactcggaaaattgcgctctgccgaaacaaagtttgcgtgtttttcgggatggaaagacacggaaacgtgataaaataactggtaaacaggtcttggatggggagggtgaaggaatgaagagcgggttaattccttcttcagcagtcgggcagaaaattaacgagtggtatcgatacatcagaacattcagcgtgccggatgcggagatcttgaaggccgagatcaaacaagagcttgaccgtatggagcctgattcaaacttagtgctttattattccctcatggaatttcgccatcagctgatgctggactacttggagccgctggaaaaactgaagatagaagaccagccgaccctgtcggaaattcttgataacattgataacagccaggccggcctcaaagggcttctcgattattacgtcaactttttcaaaggcatgtttgaatttgataaaagagaatttatctcagcgattacgtattataaacaagctgagaaaaaactggccttcgtatcggaccacgtggaacgggcggagttttattttaaagtggccgaagcttattatcatatgaaacaaacgtatttttctttgatacatataaaaaacgcttatgaaatttacgtagagcaggacacatataacgtcaggatcattcaatgccattttgtattcggcgtcaatttaatggatgaaaggcgctttgaacaggcggccaaacattttcagcacgctttgcaaatggccgaaaaagaacaaaaagcgcagcttgtcgggagggcgctgtataacctcggactgtgctactacaatcaggaccgcatcggcgaagcgattccgtactttgaacgggcggttgatacatttgaatcacaaagaatcgtcaattctcttcctcaagcatatttcctaatcacactcatttactttaaactcggaaaaaaagaaaaagcgtcggaatatcacaagcggggatatgaatatgctaaagaaacagacgatcccgtttacacggtaaaattcgaatggctgcaggctctgtatcaggcgaaaccggatgaggaaacaatcagcgcgtgtttccgttacctggaagataaaaatttatacgccgatatagaggatttagcactagaagcagctaaatattactatgaacaaaattgctttaagatttcttctgactattttctgaaagtcgaagaggcaaggaaacaaatacaaaggagtgagggtttgtatgaaattgaaatctaaatggtttgttatttgtttagcagccgccgcgatttttacagtgacaggtgcaggccagacagatcaggctgaattccatgtagctgaaagaggaatgacgtgagaagaaaataacctgaacaaaggaaaagactgcccgggaatgttcccggcagtcttttttttgcgcggccggacttggacagcggcggaaaacaaaagaaaacgccgcaggtcaaaacccgcagcgtcctcatatagacggagtgatgcttagaaaccgccaacataggcagtacctacaataaccaacaggataaataaaacaacgatcaaagcgaaagagctgattccagaatatcctgacatgagcttcacctccatattgtctataccatacaatatgtaaaagaagctgctttgtaagggatattagtggacaagagaaaaaagaggcggtgtcctatgggagtaagactccggcgaaaaactcgtcatacagcgcccgcaccgcttgtttttcctgttcttctttcaccccgaacatcatgctgacttccgatgacccctgattgatcatctcgatgttgacgccggcttcggacagtgctttggatgccctggcggttgtgccgacattatggcgcatcgcttccccgacgaccataatcagcgccagattgtgcctgactgtgacttcatctgcttgaagttcctgcttcagacgggtgacgagcctgtgttccagttctgagtccatctgatcgtgccgaaggatgatcgtgatgtcgtcaatgccggatggaacatgttcatacgtcaatccttcttcctccaaaatgtgaagggctttgcggccgaaaccgatttcccggttcattaaatatttgcttatgtaaatgctgcaaaagcccgtgtcgcttgcgatgccgatgactggcccgttcgtattgtcacggctgctgacgacgcgcgttcctttcgcctccggattattcgtattcttaatctgaacggggatgccggcccgaaaagcgggaatcagcgcttcatcatgaaaaacggaaaacccggcataggagagctcacgcatttcccgatacgtcagttcgttaatctctttcggatgccgcacgattgacgggttgacggaatagacggcgtccacatcagtaaagttttcgtacaggtcggcttttaagccgctggcgagaatggagccggtaatatcagaaccgctccgggaaaacgtcacaatctcatgctccttcgtgtaaccgaaaaatcccggaaaaatgatcaagccttcacggtttctcagacggtacaaatgatcataagactcagggagcacctgagcgcttccgggttcattcgtcacaaacagccccgcttctttcgggcttacgtattcggctttcacgccctgccggcggaagtaggccgcgatcagcttcgcgttgttgtcctcgccgctcgctttcaccgcatccatatactgatcgggattggctttgctgctgtttaagagagcgaataggtcactgcggattctttctataatagagaaatccaggttcagctcacgcgcgatggcggcgtaccgttcaatgaccggttcggcaagctcgggcgctgcaccattttgcaaataatgctccgcacagcggattaacagatccgtcacctttgtatcgtccgagaagcgttttcccggcgccgatacgacgacggctttccgcgagggatcagccgtcacgatttgaaacactttctcaagctgggctcctgacgcaagagagctgcctccgaattttacaactttcatgatttacatcccctaatatttaaattttctcacaaatttaatttttattatctctctttcaaacatgtaaatcaaggattttttctatgtggggagaacatttgtattttcgtggaggaattttgccgctgtttgtcagatttgtttcccgcaagcgtgtcatcatgtgcaaaaaatgataagcagccaaatgaaggttatagaaaatcctgcaaattcttgatagactgattgtaagacaatttagtgtacggcccgcggatgaccgtttttgaaagcaaaactgtattgactgcgcttggaaagatgataagattatagttgtcgttgataatgataatcattacgagtggggatatatgggagttgtttggcaatcagtcataccgtttgtgatgggtgcagggaggcagcatgaagctacgttacttacttttgctactggcggttttggcgtgtacttctatatttatcggtgtagaagatttgtcgccgctggatatttttcatttaaataaagaacaggcaggtacattgtttgacagccggctgccgcgtttggtgagcattatcatcgccggcatgagcctgagcatctgcggattaatcatgcagcagatcagccggaataaatttgtatcgccgacgactgcgggaacgatggactgggcaaggctcggaattttgatttcattaatgctttttacgtcagcgagcccgcttgtgaaaatgtctatcgcttttattttcgcgttggcgggaaatttccttttcatgaaaatcctcgagagaatcaagttcaatgatgcgatttttattcctctcgtcggtttaatgcttgggaacatcgtcagctcaatcgccacgtttatcgcatataaatacgacctgatccaaaacctgtcatcttggctgcagggagatttctcactggtcgttaaaggccggtatgagcttttatatctgagtatcccgctggtgatcatcgcttatgtgtatgcggataaatttacggtggcgggaatgggagagagcttttccgtcaatctcggcctgaaatacaaacgcgtcgtcaatatcggtctgattatcgtgtcgctcatcgcttcactggtgatcctgaccgtcgggatgctgccgtttctcggtttgatcattcccaatatggtgtcgatttacaaaggggacaacctgaggagcagcctgcctcacaccgctctcttgggcgctgtttttgtgctgttttgcgacattttgggaagggtgatcatcttcccgtacgaaatttccatcggcctgatggtcggtgttatcggcagcggcatcttcctgtatatgctgttaaggagaaaagcatatgagtcataataaaaaaattacgctgctggcggcgctcgccataatatgtatcggattctttctgttctacggactgggcaattgggaatactccctgccgagacgatgcttcaaagtgcttgccatgatgctcacagggggagcgatcgcgttttcaacggtcatcttccagacgattacaaataaccgcatactgacaccgggcattttaggcctcgattccctgtatatgctcattcagaccgtcatcgtgttcctgttcggttcaatgaatatcgtcatgatgaacaaaaatcttaatttcgtcatctccgtcgggctgatggtgctcttgtcactcgttttgtatcagctcatgtttaaaggcgaggggcggaacgtgtttttccttctgcttgtcggtgtcgtgttcggcacgctgttcaacagtctgtcatcctttatgcagatgctgattgatccgaatgagttccaggttgttcaggacaaaatgtttgccagctttaacaatatcaacaccgatcttttaggatttgccggtgctgtctttcttctgacaggcatttatgtctggcggttcacgcggttttttgacgtgctgtcgctcggcagggagcacgccgtcaaccttgggattgattacgataagcttgtgaaacagatgctcatcgtcgtcgccattcttgtgtctgtctctacggctcttgtcgggccgattatgtttttaggactgcttgtcgtcaatctggcgagagagtttttaaaaacctacaggcacacgtatttaatcgcgggttccgtcctgatcagcatcgtcgcgctcgtcgggggccagttcgtcgtggagaaagtgttcacgttttccacgacgctgagcgtcatcattaattttgccggcgggatttattttatctatctgctgttaaaggagaataaatcatggtagaggtcaaaaatgtaagcaaacaatacggagggaaaaccgtccttgagaaaacgtctctatccattcaaaagggcaggctcacctcgtttatcggtccgaacggcgcgggaaaaagcacgctgctgtctatcatgagccggctgattaagacggattccggagaaatcacggtcgacgggcaagagatcggggcctgtaaaagcaacgatctggcgaaaaaaatcagcatcctgaagcagacgaaccaaatcaatatcagactgacgattaaagacctggtcagcttcggcagatttccgtattcccaagggaaactgacggatgaagattgggtgcatatcaaccaggccctcagttatatgaagctggatgacttaaaggataaatacctcgatcagctcagcggaggccagtgtcagagggcgtttatcgcgatgatcatcgctcaggatacggactatatttttctcgatgagccgctgaacaatttagatatgaagcattccgttgaaatgatgaagctgttgaagcggcttgtggaagacttcggaaaaacggtcgtcgtagtgattcacgatatcaacttcgcatccgtatattcagaccatatcgtcgcactgaaaaacggacggatcgtcaaagaagggccggcggaagagatcattgaaacctccgtgcttgaagatatttatgatatgaccatcccgattcaagagattgacagtcagcggatcggtgtgtacttttcttaaaaaccagatgaggtgaaagtcatgaaaaaattcgcattgctattcattgcgctagttacgatttttgttgtttctgcatgcggaaacggggacaaaacatcaggcaaatcaaaagaaacaatcacaatcaaagatgatctgaacaaagaaggagtcaaagtgccgaagaatccgaaaaaagtcgtcgtattcaacttcggaatgctggatacgatggatgaactcggtttacaggatcacgtggcgggacttccgaaacaaaaccttccaaaatacttatcttcatataatagtgataaatacgccaataccggcggtttaaaagaaccggattttgaaaaagtcgcggatattgatccggatttaatcattatcgcccacagacaatctgattcttataaagagttctcaaaaatcgcgccgacgatttatcttgatgatgactatacaaactacgttgacagattcaagcaaaacaccgaagtgatcggcaaaatctttaacaaagaaaatgaagtgaaagataagcttgcgaaaattgacaaatccattgccgatctgaagaaaaagacaagcagcacggataaaaacggattagtggtgatggcgaacgacggcaaaatcagcgcgttcgggtctaaatcaagatacggcttcattcatgatgtgttcggcgtcaaaccggctgacaaaaacatcgaagcctcactgcacggacaaagcatttcctatgaatatatcgccaaaacaaaccctgattacatgtttgtcgttgaccgcggaacagcgatcggcacaaaatcttcaacaaaacaagtggttgaaaatgattatgtaaaatcggtgaaagccgtgaaaaacaaccatgttgtctaccttgattcagctacatggtatttatcaggaggcggcctggaatccatggcgcaaatggtgaaagaagtaaaagacggaatcgagaagtaaaaaaagaacccggtcacatacgtgatcgggttctttttggtttaccgcgtaacggcctgctgctgctcgggctgacgcggttttttcttcaatgtaaaagataggaggaagccggccagcgcgatgcaggcggctacgacaaaggccgcattcatgccgtgcagggcggcgtttgccggagttgacgcattggcgtgcgcggcctggctgctcatcacggaaaccagcagcgccgtaccgatagaaccgccgacttggcggacggtattgttcatggctgtgccgtgcggaattaagtggcgcggcagggcgttgattcccgctgtcgtcaccggcatcataatcatggctgttcccaaaagccgtgcggtataaacgacgacaatccaaatgagagacgtcgagtccgtcagattcataaacggcagggacgtgagcaggatgatgaagaatccggtcatcgcaaggccttttccgccgattctgtcaaacacccggccgataaacggagacatcatccccatcacaatcgcgcccggcaaaagcattaatccggtatcaaacgcggagacgccccggactttttgcgtgtaaagcgggagaatggtttccgttccgatcagcagcgcgaaaacaagcgttccgagcagggtggtcaggctgaaaatcccgaaagaaaacacacggaattccagcatcggttttttgagcttcatctgtcttgcgataaagaaaatcagcgcggccgctccgacaagcagcgaagtcagcacttcagtactggtccatcctgaggaaccggcgcttgagaagccgtaaagcagcccgccgaatccgagggtcgataagatcacggataaaatatcaatctgtgtttctcgtaatgtcgtgacgtttttcatcagaataatcgctaaaagcaaatcgatgactgcgatcgggaagatgatataaaacaaagaccgccaagagaatgcttcgaccgcccatccggaaagcgtcgggccgatcgccggcgcgaacgaaataaccaagccgaccatacccatggcgcggccgcgcttttccatcgggaaaatcgtgagaaataccgtctgcatgagcggcagcataattccggcgccggccgcctgaataatccgggccgttaagagcaccggaaagttcggggcgaatgcgccgacaatggtgcccaccgtgaaaatactcatagcggaaatcaggagggtgcggctcgtaaatttctctattaaaaatgcggtaatcggaatcaaaatcccgtttgtcagcataaacgacgttgtcagccattgcgctttgttggcatctatattgaagtcattcataatgtgcggcagcgccgtgataagcagtgtctggttcaaaatggcgacgaacgctcccgccaaaagaatcccgacaatgacagagcggttgtatggtgcagttttaatactcttattcaagctgattccttctttctttatagtttgagcaatgttttaacggctgcaagcggctggtgcagcggtccggcctgctccaaataaccgatgagcgcttttataagaaaatcccgcggctgtttgtccgctgattctttctccagcataaccgccgcggaagcgagtcctgcggcatcatatttttcctccggaagggctgagacggcttctttcagttccttcaggctttcagccagcaatacggttttgtcttttggctcaaatgaggaagcggaggcggtataaaggtcaatcatctcctgaggcaaagccgtttcggttttcctgttttcgacgatgagattgagatggcggatgataaagtccgtgagcggctccagggcgagcggttctttttccagcttaatcagcgtgatgcattctctcaggagcccctgcaggacgatcaccagctcccatacataaggaataatgtcttcgccgtacgtctgaatcagtgaatcgcgatgccagcagataaaggtggagcgggccctgtgaatatgccgttttacccgctcattaatggaagaggggcttccgtacatcagcatattaaaaaactgctggttgcgcctgaagccttcaagctcagccatcagttttttggcaaaccgttcctcaggggagaggctcgtttcttcatttaataatgaagcggccgctaccatctgtttctggttaaaatcgagcagctccaggagcaggtcttcctttgattcaaacagcttatacaaagatgctttggagactttgcactcctctgcgatcgcctgcatcgagaccgacgaaaagcttttcccggaaaaaagcttccttgccgccagcagaatatccgttttcttatcattcataagcccagattccttctttcgtcacaatagaaaacccatcggttcacagaaaaccaatgagtatatgatgaaaatattaacaaaaatttttacatagtgtcaacgcttttgtttgagaaatagaaaaaacctgccggagtgttccgacaggctgatacgtttatttatccgtcttaaatccttgtttttcaagcatttcacgaatgtgaggataataaacctgcttatagtaggaagtgatgccttgtgaccagtttcttgtttcctgtccgtcggtgcgttttttcatgtattcggacatctgcttgtcataggcctcgatatgggttcttaaatcttcttcttgatacgtttcatgatgcagaacggctgcttgcggcagacgcggttttttcgcggagcggtctgccggatggccgatgacgagaccggaaatcgggaaaacgtatttcggaagtttcagcaattcaatgatttcgtcaggcttgccgcgcacggcgccgatcggcacagtgccgagtcccattgattcagccgcagccgttgccgtacccagcgcaatcccgacatctacggctccgactagaacggactctaaaccgttcgtgatctcaagcggtgtatcattatattcttcaagcgcaattttggcgcggttaaaatcagcgcagaataaaaggaaaacaggcgcttggtcaatccacggctggccgccggccaattcggatatttttttcttccgctccttatctttcaccgcaataacggtaaattgctggccgttaatggaagtcggcgctgcctgagttgcttggatgataaggtccagctgctcatccgatacgggttcatctgtgtagctgcgaatggaacggtggtctgttaatatttgaaggacttcgttcatgtcattcatcctttcgttactctgacagttctgtgcggacgacgtcaagcggcgcactcagcacttcttttgcttttgccacgaatccttggaaatggtcagttgcgttgtggaatttcatcgcttcttcatctttccattgctcaagcataacgaatgtattttcctcaccgactttttcgaaaagatcgtattgcacatttccttcttccgcgcgtgaatgctgaacaagtgattgtgcttctcctaaaaattcctcgcgtttatccgcttttactttcatgtaagcctgtaagacgatcattgttattcctcctgattgggtttatttgttatagttcgaatattatcgaactaactgtaacatgtttcgcagtgaatggtaaaggaaaaaccctcaccgcctaaattgtcacccgccgcttttatgtgttacatttgactcatgaacattccaaaccatcctgaaaccgaccgcttacagctgacaaaggttcttcatgctctgagtgatccgctccgcttagagctggtcaaacaattggcggaaacaacagaaaaaacgtgcggtacctgcgctgatgtccgggtcgccaaatcaacgctgtcccatcacttcaaagtgctgcgggaagcggggatcgcccaagtgcgcatagacgggaagcaccgttattattccctgcgcaaagatgatttacaagcggcgtttcccggcctgctggaggcgattttgcagacagaaccggaccgctggtaaataagtccccgaattccgggggtttttttatgcgtcgaaaaccgcccggtaaagcctgaggacgccatcttgaatatcgctctccttcaggcgggcgaaccccagaatgagctgcggcttatttgaatcgcctcctgctttcagacggaaccggctcatcgcaaacagatcgagctgttctgcatccgcccgtgccaaaatctctttttctgaacgggcgcagtcaaactcagtgacaaaatgaagccccgcattggcgccctttacactgattctttctccgaatatttcttctaaagccgaaatgaggcgttcccgcatgttcttataatgctgcttcatctttttaatatgtttctgatattcacctgagtcgataaattctttcagcgcgagctgggcaagcgtgctgcacgtatgcaggtcatacgctctctctttgaacgtccgcaaaagcccgggcggcagaaccatatagctgatgcgcagacctgggaaaagggattttgaaaaggtccccatgtagatgacattttgaaaccggtcaaggctttgaagcgccggtatcgtatcggcgtcatatttaaattcactgtcataatcatcttcaatgatgaagcggccgttctgttcggcggcccagtttaaaagctgaatccgccgggaagcgggcatgatcacgcctgaggggaattgatgggaaggcgtggtgatcaatacacagggccggcgtttttcgatttcggccatggacatgcctttttcatcaaggctgatcgtcgcaacctttttcccgaggttttgcagcagccggtacatcctcatatatcccgggttctccatggcgtacagcgcgtcttttggcagcagttccgtcagcagctgcgtcagcatttgcgtgcccgccccgagcacgatttgttccgggcggcatgtaacgccccttgtcagggaaataagccgcgaaatggtttcacggacttcatataagccttgcggatggacgagttccccgagtgtatgaaatgaacgggcggctgctttatgctcacagcggaaccagcttttcaggggaaaatgcgccgtatccacgctcatatgagaaaacgaaatccagccgctcttatccggctcccgctcttttaaatcttcaggcaatgagagcgaaggcgtttcttcatgataaaccgtatcaatttcctccacgaaaaagccttttctttcgactgcatataaataaccttccgaaagcagctgctgataagctgaattcactgaattcacgctgaccttcagcgtctcggcaagctcccgtttagacggcacctttgtatgaggcatcaggctgcgtttcaaaacggccgcttttatgtgctgatagatctgctgatagatataatccgccgtttccgaatgattaatggaaatcgtcagcatccagaccctgctcctttctgataccatggataaattgattttggtacttttcatcataccaaaaagaagtcagaatgataagaaaacaatatagggggatggaatctatgagtcgaacagcatcatcggaagtgacaactgcccagtggcagcaaaaacgggaccaattcgtttccaagggggtcggcaacggaaaccgcagcatggcggtaaaaggggaaggggcgcttttgtacgatttggacggcagacgattcattgattttgccggagcgatcggaacgctgaatgtcggccattctcatccgaaagtggtggaggccgtgaagaaacaggcggaggatctgattcacccgggatttaacgtcatgatgtatccgtcttatattgagctggccgaaaaactttgcgcccttgcgccgggagatcatgcgaaaaaagcgatttttctcaattcgggggcggaagcggtggaaaacgccgtgaaaatcgccagaaaatatacgaagcgccaggctgtcgtgtcatttacaagagggttccacggccgcacgaacatgacgatgagcatgacgagcaaggtgaagccttataaatacggtttcggcccgtttgcctcagaggtgtatcaagcgccgtttccttactattatcaaaagccggccggcatgagcgacgagcagtatgacgactttatcatcagcgcttttgaggatttctttatcgccgcagtcgcaccggaaaccgtcgcctgtgtcgtaatggagccggttcagggagaaggcggcttcatcattccttcaaaacgtttcgtgcagcacgtcgccgctttttgtaaaaaacacggtatcgtttttgtagcggatgagattcagaccggttttgccagaacgggaacgtattttgcgattgagcatttcgaagccgttccggatttgatcaccgtatccaaatcacttgcggccggattgcctctgagcggtgtcatcggccgggcggaaatgcttgatgccgccgcgccgggggaactcggtggcacatatgcgggaagcccgctcggctgtgcggctgcgctcgcggtcttggatattattgaagaagaagggctgaatcagcgttccgaagagatcggccggatcatcgagcatcaagcgatcgagtggaaaaaagagcatgcctgcatcggagaagtgcgcagactcggcgcgatggcggccatcgaaattgtcaaagatccgtacacgcgggaaccggacaaagcaaaagccgcggcgatcgctaaaacggcgaacgagaacggactgctgctgctgacggccggcattaacggcaacattatccgattcctgacgccgcttgtcgtgacggatgagcagctcaaagaaggcctttccattatcgaagcagctctgtgagttcaattattggaatcccgccggatgtgtctgctatcatgaaagtgtgagatacatcaacaagcattcaatggttttactataggaaagaaaggaatgttcaatatgccagaacaattaacagtgtacaacccggcaacgggagaggcgatcgaaagcatcccccagcagacggccgaagatgttgaaaaagcgattgaacgttcacatcaagcgtttcaatcatggtccaaaacatcagcgggagaacgtgcctcacttttgagaaaatggtatgagctgattgttgaaaataaagaagaacttgcggaattaattacgaaagaaaacggcaaaccgtacgaagaagcggtcggagaagttttatacggcgccggctatattgaatggttcgccgaagaagcaaaacggatttacggcagaaccgtacctgcgccgacaacgggcaaacggattgtcgtcacccgtcaggcggtcggcccggtagccgcgatcacgccgtggaatttcccgaatgcgatgattacaagaaaagccgcgcccgctttggcggcaggctgtacgttcatcatcaaaccggcggaggatacgccgctttccgcttacgcccttgcgcgtctcgcatatgaagcgggaattccgaaggacgtgctgcaagtggtgatcggtgacggagccgaaatcggaaacgtcttcaccagcagcccgaaaatccgtaaaattacctttaccggctcaacgcctgtcggcaaaatcctgatgaaaaacagcgccgacaccgtaaaacatatgtcaatggagcttggcggacatgcgccgctgatcgtggatgaagacgctgatcttgatctggcggtagcccaaacaatggcctctaaattcagaaatgccggccaaacctgcgtctgtgcgaaccggctgatcgtacacgaatccgtgaaagacgagtttgcgaaaaaactgagtgaagaagctgcgaaactcaaagtcggaaacggtcttgaaaaaggcgtaaacgtcggccctgtcatcaacaaaaaaggcttcgataaaatcgtcgggcaaattaatgacgccgtggaaaaaggtgcagaagtgctgacgggcggaacgtatgaccaaaacgacgaaaaaggatgctatttcgtgacgccgaccgtgctttcaaatgtagatacatccatgaacatcatgcatgaagaaacattcggcccggttgcgccgatcgttacgttctcagatattgatgaagcgatcaagcttgcgaacgatacgccgttcgggcttgcggcttatttcttcacagaaaactaccgccgcggcatctatatttctgaacagcttgaatacggtatcatcggctggaatgacggcggtccgtccgcggttcaagcgccgttcggaggaatgaaagaaagcggcatcggccgtgaaggcggtacggaaggcattgaaccgtacctggaaaccaaatacatgtctatcggactttaatgagccgaaaagaaagccccgcttctaagcggggcttttttattgagcggtctgccggtgaatatcgccggcaggcttttttgatcttgcgggaataatcggttcgattccagacaaaataacagcaaatacgattgaaagaaggtcgccatcatggatatattactggctcttctcccggctttattttgggggagcatcgtgttatttaacgtcaaattaggcggcgggccttacagccagacgctgggaacgacaatcggggcgctcatcgtttcgtttgtgctgtatctgtttgtccatccggtgctgtccgggcgcatttttattgtcggcatcatctcggggctgttttggtcgctcggccaaagcaatcagcttaaaagcatacagctgatgggcgtttcaaaaacgatgccgatatcaacgggaatgcagctcgtctcgacttctttgttcggtgtgatcgtattcaaagaatggtcaaccccgatcgcgattacgctgggtattctcgcccttatttttatcatcatcgggattgtgctcacatctttagaagataaaaaggggcgggcggacggagaaccgggaaacttaaaaaaaggcattgtcatcctgctgatctccacgctcggctatttggtctatgtcgtcgtcgcccggctgttcggtgtatccggatggtcagcgcttctgccgcaggcgatcgggatggtcatcggcggactgctcctgacgtacaagcataaaccgtttaataagtacgccctcaagaacattctgccgggaatcatctgggcgctcgggaacatgtttctgttcatctcacagccgcgcgtcggagttgcgacaagtttttccctctctcaaatggggatcgtcatcagcacgctcggcggaatcttcattctccgtgagagcaaaacgaagcgtcagctggtcgccattgccatcgggattatcctgatcattgtagccgcggtattcttaggcgttgcgaaatcaaattcataacatatgcaggaggtttgaacatgtacacggatttaaaaggaaaagtcgttgccattacgggagcttcatcaggattaggaaaagcgatggcgatccgcttcggacaggagcaggcgaaagtcgtggttaactactatagtaatgaaaaagacgcccaaaccgttaaagaagagattcaaaaagcgggaggcgaagcggtcatcgttcaaggagacgtcacaaaagaagaagatgtcaaaaacatcgtgcagaccgcagtgaaggaattcggcacattggatgtcatgatcaataacgccggcatggaaaatccggttcagtcgcatgaaatgccgcttaaagactggaacaaagttatcaataccaatctgaccggcgctttcttaggaagccgcgaagccattaaatattacgtagagaatgatattcaaggaaacgtcattaacatgtcaagcgtacatgagatgattccgtggccgctgtttgtccactacgcggcgagtaaaggcggcatcaaattgatgacggaaacgctggcgcttgagtacgcgccgaagcgcatccgtgtcaacaacatcgggccgggcgccatcaatacgccgatcaacgcggaaaaatttgccgatcccgttcagaaaaaagatgtggaaagcatgattccgatgggatatatcggtgagccggaagaaatcgcggctgtcgccgtctggcttgcttcaaaggaatcaagctatgtgaccgggattacgctgtttgctgacgggggaatgaccaaatatccgtctttccaggcaggccgcggataagaaaaaaagcgatcgcaggctctttagagccggatcgctttttgcttacacacgttttttctttacaagcgccgcgatggaaaggataattgccgcagctgacagaacgatggccgcaatatcaagcgctgatacgccggatttgctttcttcgtttgactgttcagctccgtgcgcatccgtcacgctcgccgatttcgttattttcgtaatcgagtgaggcgtgtcggctttctcatcacccgtccattctacaatgctgccgtctttgtaatattggtaagcgtcccaagcggcatctccgctcttttcaggatttttcgcaacgaacgtgaactgctggaattggccgggctgaatgccgccgtcctttgcttcccaagtgacggagaccgctttgtcatcatgtttggatacggatgttttccagcccggaatcggctgatactgctgaaattcaacgccggcgggcattttcagcacgactttcgttgtcggctcattcttttccacaggcactttcatcgtgtacgtttcccaagaaccggccgcggattccgcgggtttgactgagacgtgggcgcttgctgcagccgtaaaaccgacgagtgacagggtcacggcggatatgaatattaaagctttttttttcaacatgagatacactccttagtttgtcgttgagaatatttggttgatttcattaaaatcgtttgtcagtccgtggactttgatcttccagtttcccttttcggtgatggacaggttggcggcttcgaatgtgccttccttcgtcttcttcaaatcaaaggtgctttcatgctgtttgccgctgaagcccgtctggtaaacagtgaccgtaaattgctgaatgtcttttactaagctgccgttatgatcggtgacaatgacttgaaattcatttttacccggctggttcggcgtaatgtgcaaggatagggtttccccgtttccgatcgtttctgagccgttaaaaggcaatggcgcgggcggaggcggactgggcaggcttgtgaagacggcggttgtgaataacaccgcaatgcctagtgcccattcggcctttatcgttgcgctgatgctcctttttctgctgaacttcgtcatccatacgtgaacggcgccgagcgcaagcatgatgacaaacagtccgattttcaaaaggagcgtcttgccgtaagcggtgtgaaagagtgaatcgaacgagcggataatgaaaaatccattcagcactcctgaaaataacagcacgccgacagaggcgaacgcccaaggagaaaaccgtctgaccgtttcccaagcgatggttttatcgggttctctccactctgatgaaagaagcagcacaagcgcggcgataccgcccatccatacagacgcggccgataaatggagaaagtccattgcgatgccgaccgctttttcgtcgataacggccgcatgcccggcgaatgcttttgccaaaagcgaagcgaagaagaataacagcggcgccgtccagtacgcaaatgaccggaatgctttcttcttcagcagcgggatcatggacagggcgagcaggataaataagctgatctggatcatccagacgtacccgcctgccgttttcagaagcgtttcttttacatagtccggctgaaacgcggcgctccaagcgccgcccgcgttttctttcgtctggatcgggagctggcacacgagcgcgagccccgttaaacataaagaaatcacgagcagctttacagttcgttttgcttttgatgaatcttcattatttctgtaccaaaacagatggaaaaaagccgtgccgataaacagggagagagcggtgtacaaaataccgcggtcgatggccgcttcgggatgaagcgccgcttgcgatgatgtctgctcctgaagttctccgccggcttttccgatgctgaaagggatgacgccggataccggatgtccgtcggccgataccgcgttccattccgctctgtaaatatcatgcggcagattttttttcaatgccgcggtcatgatgcgggcattatttttttgaatcaccgttttgcccgcgtcaacccgttcaccggatgaattatagaccttaatggagtggaagccttcttcaatctgttcattaaactcaatttcaatctgcttcggcgcttgttttaattcgctgttctcacccggatttgagtttgtgatgtaggcgtgggcgaagcttgttttcggaatcaaaacaaggaacagcaaaaagacgagccagcgtttgttctgtctcatggatgatgacaccgccttccggttggttgttgttatgtcttgctgcaggtgcatcccttctgcctgtcgtgtaagatgatgtccgccgcctcgtcaaaggtgcaaatgaccccgccgaatcctttttgaaaccgttctgcgtaatcaagcgttgagaagggaatcgcctgaggccggcagcagtgaaggtcaatatcggcatggactaaaaagtatgcggaagctgccgttagcgtcgtctgaagaagaaaatccttacaaatgacgtgggacacttcatcctttttatcctcataccgcaaaatcgcgcaatgaatgcagcacatctgctcaacggtttgtgaaacggtaataagctgaacagaatacgaatgctgaatcggccgcaggcaatagccgcattgattggcgcttcgttctgaagcgggagggagcgtaatgccgccgggtgtccggataatccggtttgcatccgccagctgattgacgtctctgtacacggtcatctcggagacgccgaatctctcgcttatgtcagagattttcagcgcgccctcttctttcagccattcaagcaaggtttgctgtctgtgaatcggaagcaattctgcatcctcctttttatgcgaatgagtgatgaacctccctctaagagtagatgttttcacaaatgcacacaagagcctgatgataaaatatgtgaaaaaatgttgaacaatcacaaatgtaaaacacgcagtcagactctgttataatagaagagttgaatggaggaataaacatgaaagaaacgacctgcccgaactgcggcaagccgattacaggcgacatggtcagatcatcgatgatcccgtgccagtttcagtgcgggcattgccatgtgaaattgcgtgaatataaagtatcagctccgattatggctgcggccattgcgatcacggtgcttttgatttatcttgtgcagatggccagaaccgccgtcatgccgatgtttccggcagcgcggtatgtgccggccgccattttcgcgctcgtatgtgcgtatccggtgtttattgtcagtgagcggctcattgccaagctcgtcgtcacaaaaggacacattatatacagaaagcggtaagacacctttgatgaggtgtcttttttttgttaaggatttgtcacagtctctgtgccaaactcctctttacttttcattgaatggggattgtaagcgttttatgatgaagacacaggggagagagaaaccccgtgtcttatttattttcatctgaaggcaggcaaacagggagggaatgaacatgcagcaagaacagcaagctggcatgaaagtgaagatacagcggttcggcagttatttaagcggtatgatcatgccgaatatcggcgcatttatcgcatggggaattatcaccgcgctgtttatacctaaggggtggtttccgaatccgcagctgaatacattggtaagcccgatgattacgtatcttctgccgcttttaatcgcatatacgggcggaaaaatgatctatgatcaccgcgggggagtcgtcggagcgacggccgccatcggagtcattgtcggagcggacattccgatgttcttaggggcaatgattatgggacctttgggtggttatctcattaaacaattagaccgtctgtttaaagataaagtcagacagggttttgaaatgctgatcaacaacttcacggcgggaattatcggcgcggtgctgacgattatcgcgttttatgcgatcggcccggtcgtcctgtctcttaacaaattgctggcggcgggtgtggaagtcattgttcacgcgaatttgctgccgattgcaagcgttttcgtagagccggcgaaagtcctgttcctgaataacgcgatcaaccacggcattttaagtccgatcggaatcgagcaggccgccaaagcgggaaaatccattctgttcttagtggaagcgaaccccggaccgggactcggtattttactggcctatatgttctttgggaaaggctcttcaagatcgacagctccgggagcggcgatcattcatttcttcggggggattcatgaaatctatttcccttacattttaatgaaaccgatgctgatcctcgcggcgatcgccgggggagcgagcggactgctcacattctcgatctttaacgcgggtcttgtcgccgcatcatctccgggaagcatcatcgccattttggcgctgacgccgaaaggaagctatctcggcgtgctggcgggcgtcatcgtggctgcggccgtatcgtttatcgtctcggcgcttattctgaaatcgtctaaagcgggcgaagaagatttgacagccgcggcggaaaaaatgcaggaaatgaaaggcaggaaaagtgaagcggcggccgcattggcagacaaagaggaagagccggaaaacagcgccgctgatatttccgctgaccaagtcagccgcattatcttcgcatgtgacgcgggtatgggatcgagcgcaatgggcgcctccattttaagaaacaaagtgaaaaaagcagacctggatattgatgtgacaaatacgtcgatcaataatcttccgaatgacgcggatatcgtcattacgcataaggacctgactgaccgcgcgaaagcgaagctgccgcaggcggtgcacatttcggttgataatttcttaaacagcccgaaatacgatgaactgattgaaaagcttaaaaactaatcaaacagaaagagggatcttcatcatggaagtattggctaaagcgaacatcaaactgaaccagacagtgaactcaaaagaggatgccatccgcctggcgggacagacgttgattgataacggttacgtgaagaacggctatgtggaaaaaatgttcgaacgtgaagaaacatcatccacgtttatgggaaatttcattgcgatcccgcacggaacagaagatgcgaaggatgaggtgcttcattcaggcatttccgtcatccagattccgaatggtgtggaatacggtgaaggcaatacggcaaaggtcgttttcggtatcgccggaaaaaacaatgaacacttagacatcctgtcaaacatcgccatcatctgctcagaggaagaaaacatcgaacggctgatcaatgcaaagacggaagaagaactggccgctattttcagcgaggtgaactgacatgattgcccttcatttcggagcgggaaacatcgggcggggctttatcggcgccctgctccatcattccggctatgacgtagttttcgctgatgtgaatgaaacgatggtcagccttctcaatgaaaagaaggaatataccgtggagcttgccgacggcggcaggcagacagaaatcatcggccccgtttcagccatcaacagcgcggtgcaagaacaagagctgtacgggctgatcaatgaagcggcgatcattacgacggcggtgggcccgaacgttctcagactcatcgccccgtccatcgcggaaggtctgaagcgcagaacgtcctctgagcctctcaatatcattgcctgtgaaaatatgatcggcggcagcagttttctgaaaaaagaagttttcggacatttgacggaagcggagcgggaactcgtgaaccggacagtcggcttcccggattctgcggtagatcggatcgtgccgattcagcaccatgaagatccgctgaaagtatccgtagaaccgttttttgaatgggtcatagacagaaccggctttgccggcgatcagccggtacttaaaggcgcgttgtttacggatgatcttacgcctttcattgagagaaagctgtttaccgtcaataccgggcatgccgtcacggcgtatgtcggctatcagcgcggattaaaaaccgtcaaagaggccatcggccatccggaaatccggcgtgtcgtgtacgatgcactttcagaaacgggcgagtacttggtgaaagcgtacggctttaagcaagccgaacacgagcagtacatgaaaaaaatcatcagccgctttgataatgaatacatcacggatgatgtgacaagagtcgccagatcaccgctcagaaaactcggagcgaatgacagattagtagggccggccaaaaaaataaaagaaccgaatgcgctggcggaaggtatcgccgccgccctgcgctttgactatcaggatgatccggaagcggttgagctgcaaaagcttatcgcggaaaaaggcacgagcggcgttcttcaagacatttgcggtattcagccgcatgaaccgctgcacggcatcgtgctcaaaaagctcaatcaataaaaatgaacccgcgtcggggggacgcgggttttttcttgcgttataatgagagggaagggaggctgcgtgatgaatcagaagctattgccccatcgttttccgtttcttttgattgacggcacgacgaacagtgaagccggaaaatgggcggctgcttacaaaaacatcagtgaaaatgactggtttataactgaataccaaagagagatgccattttcgctcgtcgttgaagcaatggcccaaacggcggcttgcgcgggaattaccggcggtgacggtctcggtctcttatccgcggtgaagaaagcggaaaggttaggtgccgctttgccgggagaccgtctggatcttttttttgaggtcacgcgaatcagacgcggttttgtgttcggccgggcgaaagcgtccgttgccgggaagcctgtggcggaagcggagctcagcatatttatccagccatcgtaaaaaaagccgcctccaccggcggctttcggacaagcgtgttattttgtatcataatctctctcactttgtgaattgtccctctggtcatgtttgtgtttttcgtcattggcgttttccttcagctcttccagcggaatcggatccgttaaatcatgatgttcaggattttcattcggtttgttcttttgttttctttctttcatcctccatcacctcaatatttcttttcctcaacgctcgccccgccaaacgcaggaagcggttttttgttcctgtgggtcatatgtattaaaatagagacgactacaatataaaaagtgaggtacatatatgccgatacaaagagaagacgcagatattaaactgatcgcgattgatatggacggaaccctgctcaatgacgagcagctcatcccggaggaaaaccggcgggcgatcaaggaagcggaggcgaaaggaattcacgtcgtcatcagcacaggacgcacgctgatgacctgccgcgaactggctgagtctctcgagctgtcatcctttttaatcacggcaaacggcagcgaaatctgggattccaactttgagctggttgagcgcaagcttcttcataccgatcatattcaaaaattatgggatctgaggaataagcacaacacgaatttctgggcctctaccgtcgatagagtgtggagaggggaattcccggaaacgattacggatcatcagtggctcaagttcgggttcgaaatcgaggatgatgaagtgcggaatgaggtgctgaaagagctcaaggaatacaaggagctcgaaatcacaaactcaagtccgatcaacatcgaagtcaatgccctcggtatcaacaaagcggctgcgctggcgaaggtatcggaaaaactcggcttcacgatggaaaatgtgatggccatgggtgacagtctgaatgacattgccatgatcgaaaaagcgggtgtcggcgtcgccatggggaacgcgcaggacatcgtgaaagaaacagctgactgggtgactgatgtcaacacggaaaacggggtcgccaaagcgatccgccactgggtgttataatagaaaaaagagagagtctcagcatgaggctctctttttttgttttgtcagatttgtgactaggtccatggtaggttttctgacaaaaggatgttcaaacttgtcagaattaaatataatgaagagaaatccaacaattcggaatagtcgttccaaatatcggaatgataataaaataaaacgtttacaatacaggagggagcttatgtttcagattgacatcaattgtgatttaggagagagtttcggtgcttataaaatcggactggatgaagagattttggattatgtgacatctgcaaacatcgcctgcggctttcatgcgggtgatcccagcgtgatgcgcaaaacggttgcgcttgcggcggaaaaaggcgtgaaaatcggcgctcatcccgggctgttcgatctgcagggattcgggcggcggcagatcgcgattacgcccgaggaagcgtatgatctgacgctgtatcaaatcggcgcgctgtcagggtttttaaaagcggaaggtgtcgagatgcagcatgtgaagccgcacggcgctttatataatatggccgccgtcaatcccggcctgtcaaaagccatcgctcaggcggtctgtcattttgatcccgggcttattcttttcgggctttccggaagcgagctgattaaagcgggagatcgaatcggactgaggacggcaagcgaagtgtttgcggaccgcacctatcaggaagacggcacgctgacgccgcgttcagagccggatgcgctgattcaggatgacaaaaaagcggtcggtcaagtgattcaaatggtgaaagacagcacggtgacatcacgtaagggacaagctgtaaacctgaaagcggacacggtctgcattcacggagacggcgcccacgcgctgacattcgcaaaaacaatcaaaaaagaattaaaagcggcagacattcaaatcagcgcgcttgcaaaagactgagcagcagagggaggaagacagcatggagcaaaagaaaaaaacagccggaaaggcttccggcaaatggtcgcttcttttaggcgcgacatttttgatggcgacatcatcaatcgggcccggctttctgacgcaaacggccacgtttaccaatacattggcggcaagcttcggctttatcattttaatttctattattttggacattttcgcgcaaaccaatgtatggcggattatcgcggtttccggaaagcgcggccaagagattgccaatatggtgcttccgggcgccggttatgccattgcttttctggtcgtgctcggcggacttgcgtttaatatcggaaacatcggcggcgcgggtctcggtcttcaagtattattcggaatcaaaccggagatcggcgctttaatcagcgcagcggtcgcggtgctgatttttgtcataaaggaagccggaaaagtcatggaccgttttatgcagatcgccggaatcgtcatgatcgtattgacggtgtatgttgccgtaacgacgggtccgccggtcggacacgcggttgtaaaaacttttatgcctgatcatatcagtgtgctggcaatcgtgacgcttgtcggcggcacggtcggcggatacattacatttgccggaggccatcgcttgcttgattcaggcatccaagggaaggaagtcattcctcaggtgacgaaaagctccgtcacaggcgtcttgattacatctgttatgcggattgccctgtttctcgccgtgctcggcgtcgtttcaaagggcctgcgcatcgatcctgataatcccgcggcttctgtattccggcttgcggcgggaaatgtcggctataaaattttcggcgtcatcatgtggtctgccgctatcacgtctgtcatcggcgccgcctatacatcggtgtcattcttcaaatcgttttcggcaaaaatcgaaaagcactcacatggcgtaattatcggttttattattgtatccactcttatttttgtcacgatcggccagcctgccaaaattctggtcgcggtcggttcgcttaacggcttaattctgccgcttgcattagcgatgattctgttgggcgcctataagaaaaaaatcgtcggcgattacaagcatccgatctggctcacgattgcaggggcgatcgtagtggttgtcatggcggttatgggcatctatacattattctcgcaaatgccgcagctatggagctgatgatatgaaaaaccatatgagtgatatgagtcccgaagaagtcagacagcttatcaggaaagggcagatgaccgggccgacggcggggttggccgcttcttacgcacaagccaatctcgtcgttttgcaaaaggatcttgcctttgattttctcttattctgccagcgtaatcaaaagccttgtccggtgcttgatgtgacggatgcgggttcacccgttccggcaatagcggcgccgggagctgatatccggacggactttccgaaatacaggatttatcggcatggcgtgcttactgaagaggtaacggatattacgccgtattggaaggataattatgtcgggtttttgatcggctgcagtttttcattcgagcaggcccttattaatcagcacatcccgatcaggcacatcgatgaaggcgtgaacgttcccatgtataaaacaaatattgactgtattccggcgggcccgttttcaggaaaaatggtcgtcagcatgagaccgattccggaaaggctggcagtccgcgcggcgcaggtcacgtcacgttttcccgccgtgcacggcgcccccgtccgcatcggaaatccgcaaagcatcggcatcagcgatttgcatcagccggatttcggagatgccgtaacggtgcgggaaggtgaagttcccgtattctgggcttgcggcgttacaccccaggcggtgatcatggaagcaaagcctgatatcgtaataacacattcaccggggcacatgctgatcaccgatatacaaaatgaatcgcttgctgtcctgtaagtgagaaagaatacaacgaggtgatgacaatgatgcagtatagcggaaatacagcgcttgatatacagccgtacggtgattccgccgttatcatccgctttggcgggcacatcagcgaagaggtcaacagccgggtgcaggcggcggcagcctgtatggaagaacggccgtttccgggcttcgttgaatgtattccggcattcacaagcttaacggtcttttatgacgtgtctgccgtctcaaacataaaaaaaggcgtctctccttttgccctggtcaagaaagaagtgacagaacgtctcagccatataatgaccggccgcaaaaaagagcgccgggtgatggaaatccccgtttgctacggcggagatttcggtcccgatttagaagaggtcgctgaaatgaacgatctgaccccggaagacgtcatccgcattcatactgaaggcgaatatctcgtttatatgcttggatttgcgccgggatttccgtttttaggtggaatgtctgagcggatcagagcgccgagaaaggcgtcgccaaggccgtccatcccggccggttcagtaggaatcgcgggaatgcagaccggtgtgtatccgatatccactcccggcggctggcagctgatcggcagcaccccgctccggcttttcaggccggaagaacatccgccgagtctattgagagcgggtgatacggtgaaattcgtccggatcacagcagaggagtacagccgcatcaaggagggagccgaatgagtatgaaagtggtaaaacccggtctcttgacgacggttcaggacacggggcggacgggatatcagaaatacggtgtgctgggaagcggcgcaatggatacgatctctctgcgcatcgccaatcttcttgccggaaatcaagaaaaagaggcggggcttgaagttacgcttatggggccagggccttcctttgagttctcagaacccgcggttattgccgttacgggggcggatttcgcctttcatattaatggggagcccgcccctctgtggaaaccggttttgataaaggaaaacagcgtcgtctcattcgggccgtgcaagatggggagccgcgcttatctcgccgtcgcggggggatttgatgtgcccgccgtcatggaaagcaaaagcacgtatgtcagagcggggatcggcggcttttgcggaagagcgctgcaaaaagatgatgagctgccgctcggccgtatgacgccatgttcggaatcaatcgcgtaccgtctgagcgattctttcggacagtatggtttctcagcgcctgattggtctgtcagcagcagagggtttctgccgctgaaaaaaaatccggtcatacgagtgcttgaaggcgctcaatttcacgcttttacagaagaagcaaaattacgtttttatcaagagtcatatacggtcacgcctcaatccgaccgaatgggctaccggctgaagggcgctccgcttgaattgcgggagccgctggaaatggtatctgaggctgtgacgttcggaacggtgcaggtgccgccggacggcaatccgattattctgctggctgacagacagacgacggggggctatccgcgaatggcgcatatcatatccgccgatcttcccctcgtcgcccaaacgatgccgggggaacatattacgttccgggccgtttcgctggaggaagcggaaatgctgcttttggagaaggaacagcagctgaaggagctgaaagcaaggctcaaaatggaatggctgatctgacaaaggggctaaagaccatggaaaacaaaaacaaaaccgtcatcaaatcaatggaactgcttcatttgtttctcactgaaccgagcctgagcttaaatgagctggtttctctatcggaaatgccgaagacttcggttcaccggatggcaagctcactggaggaaacagggtttctcacccgggcggcggacggccgttatcagcttggtctgatctttttacaattcggccagctcgtctctgaacgtctggatatcaggaaaatagccaaaccgattatggaagagctgtgcagcgaagtggatgaggccgttcagctgatcatgagggacggggatgaagccatttacgtcgaaaaaattgaaggcacccaaaccgtccgcctgtatacggcaatcggccgccggtcgccgctgtacgcgggagcttgcgccagaagcattttatcgtttctgccggaagaggagattgacacatacattcagaagacaaagcttgccgcaatcgcctcaggcacgatgacggatcgggctgaactgcttcactccattgaaagatccttgcaatcaggttatacgatcagctattcggaattagaagattatacggcggcgatcggggcgccgattttcaatcacgaaggtaaggtggctgctggaatcagcatcgccggcttcgaagcccggttttcagaggacaggctgccgtatttaaccgaaaaggtcaaaaacgccgcacagcatatttctgagaaattaggttattgaccgagccaatttttcttcactcgcgtacattacaatatcgatagtaacgagtggaggaaagtaaatgggacttgtttatacggcgctgggggattctttgacgacggggaggggatccgggccgttttccgccggttttgtccagcggttcgggcgcatgatggcagaagatttacagacaagaaccgacgtatccatctttgccaaatcaggccttgagacgggagaaattctcgggcttatgtccttcccgtacattcagaggcggattcaggctgctgatatgattacgattacaggctgcggcaacgatttgatcgattcggttcaggcatatcagcaaacatcggacgcttcggtattcaccagcgtgtccagtcactgccatgagaactttgaaaagatgataaccaagattgctgccttaaaagggtcgcacccgtctccttatgagatccgcgtcttcaatttatacaatcctttcccgggcatctccattgcagaaaaatggatatcctcttataatgcgcacctcagcacactcgcatcggcgccgcacgtcaaaattgccgacgtccacagcgctttcaaaggaaaaatgaatgaatatctttcttatgaccgcgtacaccccaacagcaaggggtatgaagtcatggcatgcgtcctgcgggggctcggatacggaagcctcgcccgctcataaaccgcgcgctccttttcatggggagcgcgcttttcgtgctccttaaaacaaacttaaaattgtccgactttcgttctatccgcgcaaaaagtacgctagaataatgggggataaagacagaaatagaattgtgttcaaaaaatgataacagaaaggatggattgctttgctgcgcgccttaaaactgtcactcgcgatgctgattattatacttgcggccgccgcatttacgtatgcggaacatacctccgtcatacagccggttatgctcgtgtttctcggtgcggtcatgttcattcaggggctggaggaaaaacggaaagaaaacgacggctccgggaaattcaatatctataccgccgtttttgtatggtcgatctccttaatcggttttacgcttcacgcgatctgagtctgatagatcctgaaaatgctccacaacgggaaatggtgaataaaaacggtgcagtaaggctttccactcctgatattccggcgatccgcgaaagccttttgtatgatcttctaatgtctcccattccacaagcagcaaatatttatgcgtcttttccatacatttggacaaggaatgggacagataacctttcatgcccgcgataatcggctccgcccggcggaatgcctcttcgaattccccctcaagaccttcttttacatacagcatggctgcttctctgatcatctgaaattcctcctttttttaatagatacattgtataaaaatatgggccgtgacggccggaaaaacaaaaaaattttaaacgctatgagaaaaaaatccttgccagcctgatttggtttaggagaaaataacagttggaaggcaggggaattgacagtgaaaaaagggttatacctattacttttactcgcaggaatcataggtttgatcggctgctcgaaaacggaatcggccgaagacagaatgaaagatttcgtaaaagactggaacggcggtcattacgataagatgtaccaaagcctcacccaggatgaaaagaaaaaacgatccaaaaaggattttgtaaaacgatatgaaaccatttatgaacaagcaggggtcaaaaatctgaaagtcactgccgaaaaacaggacgaagacgataagaaaaaagatgacctccagcacatcgattataaagtcagcatggatacaaaagcagggaaggtcgcttttgaaaacacggccgtcctgaaaaaagagaaaacagacgatggagaatcatggaacattgactggaatccttcttttattttcaaacagctttccgatgacaaaaccgtgcagatcgcaaatgaggaaccgaagcgcggacaaatttacgacaaagacggaaaaggtctcgccgtgaataccgaggtgccggaaatcggcattatccctggaaaactcggcaaggataaagacagcgtgatccaaaaactgtctgaaaaactggacctttctgaagacgatatcaaaagcaaactgaaccagggctgggtaaaagacgactcctatgtcccgattcaaaaaatcagaccggatgatgaaagcaaggtcaaaagcctgcttgcattagacggcgtgacgaaaacgaaagtcagctcccgctactatccgtacggcgaaaaaacggcccatctgaccggctatattaaaaccatcacagcggagcagctgaaaaaagcgaaagacggccaatacagcgatacttccaaaatcggcatcgccggccttgagaatgtatatgaagacaagctgcgcggcaagaccggctggaaaatttacgtcccgcaaacaggtgaggtcattgctgaaaagaaagccgaaagcgggcaggatattcatgtaacgattgacatgaaaacgcagacgaagctgtatgattctatgaaagatgacagcggagcggcagtcgccctcgaaccgcaaacgggagagacactcgcgctcgtcagcgcaccgtcttatgacccgaacggctttcttttcggctggagcggaaaagagtggaaaaagctgaatgaagataaaaacaatccgttttcagcgaaattcaacaaactttatgcgccgggatcaacgattaaaccgattgccgcggcagtcggcctgacaaacggcacattgaaagcatcggaaaagaaaaaaatcaccggaaaagagtggcagaaagattcgagctggggcggttaccatgtcacacgcgtatcagagcgcctgaatgaagtggatctcgaaaacgcgctgatcacatcggacaacatctactttgcgcaaaatgccatagatgccggagcggacgcgtttacaaaaggattaaaaacatttggctttgatgaagagattccgtaccaatttccgattgaaaagtcctcaatcgctaacggcaagctagattccgagatccttctcggagatacgggctacggccaggggcagatgctgatgtctccgctgcacttagcggctgactataccgcatttgtaacagacggaaatctcgtcaaaccgacattgatcaaagacggagaaaaaacaccgcaaatctggcataagcaagtggtgtcgaaagccaatgccgaagaaatcacgaaagggctgagaggcgtcgttgaagatccgcgcggctctgcatatcagccggccgtaagcggcattaccgtagccggaaaaaccggtacagccgagctgaaaacgtctaaagaagataaagacggcaaagaaaacggctggtttgtcggttacgattataaaaagaaagacctcttgatcgcgatgatgattcaagacgtcaaaaaacgcggcggaagccattacgtcgttgaaaaagcgaaaaagcagtttcagaatcattaaatgacgatttttgcgggctgaaaggaaaatcggccgccgaagcagaatgaaacagcatgggcaattcctgaaaacagagatacaagaggctctaagaaaaagggggatttcacatgcagcgcattcaattggctgaagacctggaattttcaagagtgatacacgggctttggcgtctgaacgaatggaatgtttcagacggagagctgctgaatctgattgaatggtgtatcagccaaggcatcaccaccttcgatcatgccgatatatacggcggttatacgtgtgaaaagctgttcggcggcgctttgtccctttcgccttcaataagggagcgaatcgaaatcgtcacaaaatgcgggattgtcattgaatcaccggagcggccaggaaacaagtcgcatcattataatacgtcgaagtctcacatcttagcgtcggcggagcagtcgcttttgaatctgaatacggattatctggatgtgctgctcattcacagaccggacccgcttatggacccggaggctgtggctgaagcgtttcacgcgctgaaaagctcgggcaaggtcagatatttcggggtatcgaactttaaagcgcaccagtacagaatgctcgaatcctatttggatgatccgctcgtcacaaaccaaattgaaatctcggcgtacaagctggaaaatattcatgacggcacgctggatttctgtctggaaaaacgcattccgccgatggcgtggtcaccgcttgcgggcgggagcgtctttacaggacaatcagataaggccctccgaatccgtgccgcgcttcgttccgtacaggaagaaatcggcgccgcttccattgacgaagtcatgtacgcatggctgttcacccacccggcagacatcatgccgattgtcggcagcggaaaagagaaccgcatttccgccgcggtgcgtgcatccgcgtacaaactcagccatgatcagtggttcaggatttataccggtgtccaaggctgcgatattccataaacagaacaaacgcccggaaggtatcttccgggcgtttgtttatgtggtgtgcaatgtctaaaaacaagtaaggtcactttgaagtatagccgtgcggatcaagagtaacaagcgtcatggcatattatctgacacatttttctttttcaatactgtcacacggtccagtgccaaattgccatttgaaaatggttgaataatcattgaaagcgttttatattataatttacaccactttccccggcagcactccccatatgccatacttctcacaactagaaaatctggaggcgcgtttcatgtatatgacagcgagagaacaaaaattaatgaaacatctattactgcagaaccgttacgagacagtgcatgaactggcagaagctttacaagtcagcacaagaaccgttcaccgcgagttaaaaacaatcaaaccgatgatggaatcattcggtctggcacttgataaacagcccggcaaaggactgaaagcggtaggaaacccggaggacaaacaaaaactcctgtcagacctgtcctatgaacagcatgaatacagcgctgaggagcggaaacttttaattctatgttcactattagagtcgcaagagccgatcaagctctacagtctggcgaacgaattgcaagtgacaaacgcgacaatcagttatgatctggatgagctggagacctggatcgcgcccttcggcttgacgctgatccgaaaaaggggcttcggcatacagctgacgggtccggaaaatgcgaaacggaaaatcgtcggcaatctcatcgtcaaccggcttgatattcagagctttttggaagcggttgaattcaatattaaaggaaaacctgacgatgctgaaaaaatgttcggggtcgtaaataaagcggaacttttgaaaatggaccggctcttgattcagctcaaggaaaaaatcgcgatcgccttatctgacagctcatacatggcgcttgcggttcatttaacctttgcgatggaccgaatcagactcggagaaaccatcacgatggaggcttcggaactaaaagcgctgcagcagacgaaggagtacggctctgcgatggaaatggcaaaagagcttgaaaaagcgtttggcgtttcaattccggaagctgagatcggttatatcaccattcatttgcggagcgccaaccgccaatacaaaacggaattcaaaccggaaaacattgaagttgaaacggccttgcaaacgaagcagctgatcggcttcatttctgaaaaaatcaaaattgatctgacggaaaacggttctttatacgacggtttaatcgcccatctggagcctgcgatcaaccgggtgaaagaaaatatcgacatgtacaacccgatgaccgagcaaattaaacgcgactactttctgctgtacatggccgtagaagaaggaatggaaaaattctttccggggcttcttttctctgatgatgagatcgctttcatcgttcttcacttcggctccgctctggaaatcaaacgggaagaagcgaagatcaaagcgctgatcgtctgttccagcggcatcgggtcgtccaaaatgctcgcatccagactgaaaaaggagcttccggaaatccgttcctttgatatgtcttccctcatcgaactgaaggaccgagacatcaccgcgtatgacatgatcgtatccaccgttccgatcccgtatggaaacattgattacgtcatggtcagtccgcttttaaacgaagaagacgctgatcaggtgaagcagtacatcaaaagaaaaattccgctgattcttgacaaaaaaagaaacggtaaaagagaagagaagcagccggagacgcctgatatgctggaagcggccggccgtatggcacattatgcggcggttatccaaagcgtgctgcggaacttttcgatcaaatccattgagtcaaacacggcgtacgaactgtttttgaatcgtttgtttgccatgcttgagcaagaaggatttgtccgtaatgccaaacaaaccgcacagcgccttgcagagcgtgaacgacagggcggactcggcattccgggaacggcgatggcgctgtaccatctcaaaaatgaagaaattgtcacgccttttttcaaaatttatgatttgacagctccatgcagtgtcaaaggcatggacggaaattccctgaccgtcggccgcgctttggtgatgatggcgccggctgatatgcccgctgaagggtcggaaatactaagtgcggtcagctccgccatcatcgagtccgaagacagtataaaagccttccagacggaggatgaagccgatttatacaaacgtttaaacaagctgttttatcatttcattcaggagaaaggacagcggtaaacagaaagcgcacacctcatatggggtgtgtttttttctgcatgtatgagggtaaggggaagggaagaaactaaaaacatgggactattgtatcattcacgaatggaatagttctaaaacaaaattgttttacaagttatattttttggtttaaaatgggttgcgtgaggaagaaaatctgacagagttttttgtgatttatgattatgggagatgaaaatatggagacattacagcatatgattctgcatgacatttcaaatagcgaagagatcgaagctgtaaaaagcggtgcgcataccctgacctacgcggaatatcgaaaacgaatcaaccagcttgcacaagcgcttcttgataaaggaataaaaaaaggcgacagagtggcgatgctttgcaaaaacggccacgcgtcatccattgtcatgtttgcggcactcgaaatcggcgcggttgttgtgccggtcagctggcaattaacaccttacgaaatgaaaggcattttagcagcctgtgaaccgaaagctgtctttttcggcactgaatttaaagagattatggaagaagttcttcctgcgctggtatcttctcttaaactgaagatcgagacaggaacagctgcggagacaacgcctgagtttgacgctttattgacaggctccggtgatacaccggatgtcgaaacggtgtctgaaaacgatacggcattgctgatgtttacctcaggtacaaccggcaatccgaaacgctgcatgatcactcacggcggcatatacaactacgtaaacgcgacattggcttacacggggagaatgcagcatgtccgcttcttagcatgccatccgaattaccatacgagcgcgattatctgccagatggtcggcacgatgagcggaacgacattcattatgacagacaatcaggaccctgtggaaaacttgaagctcatcgaaaaagaaaaaattcaaaccatcatggcgctgccagtctatttcacatacctgctgaaagcatgggaaacgcaccagactgacatgtcttctatcgtttatatgatgacgggaggcacaaaggtgccaagcagcctgatccagcagtatctcgacatcggcatcccgctcatgcacggatacggaagcacggaagcgtggggcatcagctcttggaatccgcaaatgggaatggataaagccgcttccgcgggtaaaccgatggaagaagtggacgtccgcgttgtagatccggaaacaggtgaagtccttccgcaaggctcaattggagaagtcgttgtgacaagtccgtttttattcaaaggctacgaaggtaacgaagaagcgacacgaaaagtgctgaaagacggctggttccataccggcgattccggctatgtggatgaagacggatttatctttatcaccggacgttataaagatgtcatcatctacggcggcgataatatttatcctgaccagattgaagaagtcattcagcaagtgccgggaattctcgaaacggcggttgtcggtatccctgatccgctctacggcgaaaagccgaaagcgttcatcgtgacaaacggcagagaagacctgacagaagaagaagtgacccgattccttcaagaacgtcttgctgcctttaaaattccggacattgagttcgtcagcgaacttccgaaaaacaaccttggaaaagtgagaaaagacgtgctccgcaaacaagcggtacgttcataatagagaacaaaaacccggctgccagccgggtttttttcttgcgttccatgtgaaacatttttctccgaaaacgttttgaactgtctcaatcatgtttatccggaagacagcagaggtagacaagaaatatgacaacgaaccagaaggaggaacttgacatggaaaactatccgaaggaattcccggcggaatcacaaaaccgccagccgggcattgaaagcgaaatgaatccggcgcctgtttacgaatacaaagaatataaaggcgctgacaaattaaaagggaaaaccgcgctcatcacagggggcgacagcggtatcggacgcgccgttgcggttgcttacgcgaaggaaggcgcaaatgtcgcgatcgtctattttgatgaacacgatgatgcggaagatacaaaaaaacgagtggaagaagaaggcgtaaaatgtctgttaatccccggcgatgtcggtgaggaagacttttgcaatgaagccgttgaaaaaacggttgaagaattcgggcgtcttgatattctcgtgaataacgccgcggaacagcatccgaaagaaagcattaaagacatcacaagcgagcagcttcacagaacctttaagacaaacttttactcacaattttatttgactaaaaaagcgattgattacatgaagccgggcagcgcgatcatcaatacgacatccattaatccttacacaggcaacccgcagctgattgactacacggctacgaaaggcgcgattaacggttttacgagatccatggcgcaagcgctcgtcaacgatggtatccgtgtcaacgccgtggcgccggggccgatctggacaccgcttattccggcgacattctcagaagaaacagtcgcttccttcggtcaggatacgccgatgggccgggcaggccagcctgttgagcatgtcggctgctatgtgctcttggcctcagacgaatcctcttatatgaccggacagacgctgcatgtcaacggcggcagatttgtgaccacataaggaggctgaccgatgacgatatcgaaacatgacgtgaatgcatactatcaaaaagcgggaatcgttctgactgatgatgaagtcgaagacattcaaatcatggattacggcttaggcaagcttgaggaaaccgggcttcagctgtttatttacgtgaataccgaccgctactgttcgaaagaattggtgctcttcccgcgccagacgtgtccggaacaccgccatccgccggtcggcggcgagaagggaaaacaagagacattccgatgccgctgggggaaggtgtatctctacgtggaaggcgaaaagacagagaacccaagcgtcctcccgccggaagaagacaaggaatactacaccgtctggcatgagattgtgcttgagccgggcggacaatacaccattccgccggatacgaagcattggtttcaagcgggagaagaaggggcggtcgttacggaaatgtcatcgacaagcacggatgatcacgatgttttcaccgacccgcgcatttaaggatgaggctgcacgcctcatcttttttgtatggaaaaaaataaatttacctgtataatggctaataaaggaaagaaggtgcggtcgtgttttcctgtcaaatccgggaacatctgacgatcagattgcttgccaaagaagatacggacgaattgtattctgttatgaagcgaaatcaaaaccatctcagcgaatggctcagctgggcggaagaactggctgacatcgatacgtaccgcgatgtgatcatccccgaatggcgctataaatatgcggaagagaatgggtttgacgccggaatttttgtgaagggccggttttgcggcatgatcagcatccataatgtcgatacagtcaatcaaaaagcagagatcggctactggctggatcgagagcatgaaggattcggcattatcaccgcaagctgccgggcggtcatcacccatgcatttcaggacctcgggctgaaccgcatcatgatcagcgcggctgaaaaaaacacgaaaagcagggcggtggcggaacggctcggatttcagaaagaaggactgacgagagaaggcatttttgtacagggcgcctatcatgacacggtgaactacagcatgctgaagcgggaatggagcgaagatcggcagaagagcacatttcttggtttaaatgtctccccaatgtggaaaagtaacagcggagacgttaaaaaggagtgattcttcatgaatcaaaatgaaatcaaagaaaaagtgcttgaagtactggatcatcataaagtcggttcgcttgcgacggtagagcaaggcaaaccgcattcacgctacatgacatttttccatgacggcttaacgatttacacgccgacgagcaaagacactcataaagcggaagaaattgaaaacaatccgaatgttcatattctgttagggtatgactgtgaaggattcggtgacgcttatgtggaagtggccggaaccgccaaactgaacaactcagcagatttaaaagaaaagctgtgggatccgaaactggaacgctggtttgacggaaaagacgatccgaacctggtgattctcgaaattgaaccgaagcagatcaagctcatgaatgcgggtgaaaaaacgccggccgagctggaactttaataaatcatttgattattcaggggcaatctgttatacttaactgctaagtgacaacatgcaaataaaaaagaaagtaaacttcttttttctgttttgatatagaagcttcaggcttcaacggacagcttgaaaaaaagctgagcttattcttttccttctgatattcgcccctaacgaagagatggaaaaaagactttttgttttacaattcacaccggcgcggcttcggagccgcagtgacgattgagaggtagggctttcgttgtcttgtgttcaagaacttccatggtgtttactttcgaagaatgattctgtcggaactgttaatacgaatcacccgcaggctaaggcgggcaaccatatattatttatttgcgtaagaaaagaataagacaaaaccgcgccggacatccgggcggtttttttatgtaaacggccgaaaccttgccgcagtctgcagagtctaatcagtatgaaaagatttggaggaatcatacattgcacgttattacttcacaagtactgtttatcttctgttttctgctgctgatacattcgattgaaacgcttgcctatgcaacacggctttccggcgcgagagtcggatttatcgcgtccgcgctgtcattatttaatgtcatggttattgtgtcgcgcatgtcaaacatggttcagcagccgtttaccggacatctgattgatgccgccggatcaaacgctctgtctgttgtgggcgctcagtttcgatttttaatattcggctccacggtcggaacgatgctcggcatctgtcttttgccgacattcgtcgcgttattctccagggcgattatacacttggcggacggaggaggctccgtcatgcaggtatttaaaaaaggattttcactgaacgggctgaagcatgcgcgttcttatatcagactgccgtcagtctcctatttaaaggggcttcaattccgaatgattccgaaacgcttgtttgtcattaatatggtcattacgtctatttacacgatcggtgttctgtccgctctgtacgccggccttctggcgcctgagcacagcacgacggccgttatggcatcaggcttaatcaacggcgttgcgactatgctgctggccgtgtttgttgacccgaaagtctccgtactggcagacgatgtggcgaagggcaagcgcagctacgtctccttaaaatggacctcattgacgatggtcacatcaagggtcgcgggcacgcttctcgcccagctcgtattcatccccggcgcttattatatcgcctgggtgacgaaatggatgtaacgcatgaaaaaagctcctctgcagaagaggagcttttttattgataatttctcaggccgcgatcataaataaaattaccgaacggaataaaggccgcgataaaaccggcggctgaccatttcacatgccatttgacagtaaacgccgcatacgccagcaccgccagataaatgataaacaaaccgccgtgaatggaaccggcaatggtgacggcgagcggatgatgagcccaatacttcagcggcatcgcgataaacagcagcaccaaaagcgacattccttcaataaaccccatcgtgcgaagtctgccgatcggcgtgtgtaacatacagctccctcctgtcggacatcttttttcctctatactataagcaaagggcagtcctaatatgaccatttcgcgtcagttcctgaaaaaaccttcatgatttcagcctgttgttcttgtcatttttcggatttctcttgataatatagccaaaagggtaaggaaggactacagtcatgaaactagataatgtggatctgagcatcattaaagagctgcagcgggacagccgcctgtccatgcgggagctgggcagaaaaatcaaattgtcagccccgtccgtcacagagcgtgtcagacagcttgaatccttcggcgttattaagcgctatacattggacattgatcaaaaaaagatcgggctccccgtctcctgcattgtcgaagcgacggtgaaaaacggaaaatacgatcaattcaaaacctacattcaatccattcccaacattgaattttgttttcgggtcgccggggcggcgtgttatatgctgaagattaacgcggacagtctggaaacgatcgaacacttcatcaaccgcacctctccgtatgcccaaaccgtgacccacgtcattttctcagaaattgacacaaaaaacgtcctcgattagagagagcgtgaggaagtctgttataataacaggatgagtgtgaaagaaagagaagtgaaaagcatgtcaaaaacagttgtattagctgaaaaaccttcagtcggccgggacttggcccgtgttctgaagtgtcataaaaaaggaaacggatatcttgaaggcgaccgctacatcgtcacatgggcgctcgggcatctggtaacgctcgctgaccccgaaggatacggcaaagaatttcaatcatggcggcttgaggatcttccgattattccggagcctttaaagctcgtcgtcattaaaaaaacaggaaaacagttcaatgcggtcaaagctcagcttgtccggaaagacgtcagccagatcgtaatcgctacagacgcaggacgggaaggggaacttgtggcccgctggattatcgaaaaggcaaacgtccgcaaaccgattaagcggctgtggatttcctctgtgacggataaggcgattaaagaaggatttcaaaagctccgcagcggcaaagagtacgaaaacctgtatcattccgctgttgccagagcggaagcggattggatcgtcggcatcaacgcgacccgcgccctgaccacgaaatttaacgcgcagctgtcatgcggacgcgtccagactccgacactggcgatgatcgccaaacgcgaagcggatattcaggcgttcaaacccgttccttattacggcctccgcgcggcggctgatcagatgacgctgacatggcaggataaaaaaacaaaacagacaagaacgttcgatcagacggtgaccggccgtttggcaaaagacctgcaaggaaagccggcagtcatttcagaattgaaaaaaacggcgaaaaaaagcttcgctcccggtctttacgacttgacggaattgcagcgggacgctcataagcgcttcggtttctccgcaaaagagacgctgtccgtgcttcaaaagctgtatgaacagcataagcttgtcacttacccgcggacggattccagattcctttccgcagacatcgtgccgactttaaaagaccgtttaaacggcatggaagttaagccgtacgcccagtacgtcaatcaaatactgaagcggggcgtcaaagcgcataaaggattcgtcaatgatgcgaaagtatcggatcaccatgccatcattccgacagaggagccgctgatcctttcaagcctcagcgacaaagaacgaaagctttacgatctgattgccaaacgttttctcgccgtgttaatgccggcgttcgaatacgaagaaacaaaggtcacagccgatatcggcggcgaaacatttaccgcaaaagggaaaacggttcaatcgcctggctggaaagccgtgtatgatatgtacgaggatgacgacgatcatgaggaagacaaagaccagacgctcccggatcttcagcaggggcagcgcctcactgtctcatcattgaaagaaacgagcggtcagacgaaaccgccggcgcgctttaatgaaggcacgctgttatccgcgatggagaacccaagcgcctttatgcagggagaagagaagaaccttgtgaaaacattgggtgaaaccggcggactcggaacagtcgccacccgcgctgatatcattgaaaaactgttcaacagtttcttgatcgagaaaaaagaaaaagatattttcattacgtcaaaagggaagcagctcttacagctcgtcccggaagatttgaaatcgccggccttaaccgctgaatgggagcaaaagctctccgccatcgcagcgggcaaactgaaatccgccgtgttcattaaagacatgaaaacatatgcgggcaaaacggtgaaggagatcaaaaacagcagccagactttcagacatgacaacatttcaggcaccgcctgccctgattgcggcaaaatgatgcttaaagtcaacggcaaacgcggcacgatgctcgtatgtcaggatcgtgagtgcggcagccggaaaacgctggcaagaaaaacaaacgcccgctgtccgaactgtcataagaaaatggagcttcgcggccagggcgaaggccaaaccttcgcatgtgtatgcggccaccgggagaaactgtccgtctttgaaaagcggaaggcgaaagataaatccggacgcgcatccaagcgggacattaactcttatatgaaaagccaaaacaaagaggagccgatgaacaacgcgctggcagaacagctgaaaaaactcggcctggataaatagatcagagaaaggcagcatttgtaaagaaatgctgccttttgttgtgttttttactgtaatgggaatacgatccatgtgaagagggaaaaggtgagaggcggcgcttccatttaaaattttccaatgtgaaaaaatgctagtattcttttatcgtttcctttatagtaaaaatactttgtgaaaaaataagatatgggtctaaaaaaggatttgtaaaataggaggatggactgtgaagcaattcgtttttcgtctgatgatccttttgatttcaatcgttctgacggcggggtgcgcggaggccggacctgaaaaacagacggcggccgaaccgtccggaccgcttcagcccgcagagcattttatttatcataaattgatgaacgggcgggggatgatccggacgaacatatccggtgagccggaatatttatctgagtctctcggactatggatggcatttttgctgaacaggaaagatgaacggcagtttcaagcgcaatatcagcttctcaccgattcgtttctgacgaaaaacgggctcgtgtcgtggaagattgacgggaataaagcgagcggcaccaatgccttaattgacgatttcagaatcatgaactgtctgaatgaggccggaaccctgtggggaaacagtgaatacgggaaaacagcggtgcagatcgggaaggcgctggaaaaatacaatacaaatgacgggtattttacggattattatgatgccgcttcaaatgccgcatcaaagaccgtgaccttgtcctatgttgaccccggcgccttacagatgctcagagaaaaagggattatcgatgagaaaacggaaaaccggaaccttgatgttctcaatcgagctcccctgaaaaatggttttctgccgaaatcattcaataccgaaacaaaggaatacaaatatgacagcgaagtgaatgtcatcgaccagctgtacgccgccgtgaatctgaagcggggcgatggcaaggctgccgcgctgtcaaaatggatgatagaggaatttaagtcgcgcggacagctgtacggacgatacagcgcagacacgaaggagccggcggttcagtacgaatcaccgtccgtttacgccctggccgttctttttttagcagaacaaaaagctgatccggctgtcatcaagccgctttatgaaagaatgacttcatttgaaacactggacacgctgaaacccgattacggcggctatatgagcgggagcgatacacattctttcgataacctgctgccgcttctggctgaaaggaaattgtttaatgaaaatatcattcaatgaatcacaaaaactgtgcagctacacagcagttatgctggtgctgctgtctttttttatttactatgcgtctcagcaatccgcagggcttctgataacctgcatcacattgcttgttgcgggagccggtatatggttcggggcaatctacgcgctcgtcatgaccttactcgtcttatttgttctcggcagcctgctcctgtggtttcagaccgggagctttatggcgtctgccgatgccgaaagtctgcaggtgctggtcatttgggggattgcgctgctgctcttttcttacatagcgggaaggattcacgagttggcgaaggggcttgaacgctcagtgaaacagctgcgtgaagagattacgagctttgtcgccgtcgacagggtgaccggctttgacaaccatctgcggatgaagctggagctttccgaggaaatcaagcgggcggaacgctacggcaattccttcgtctttttgctgctgcacatgcattatttcaaggaattcaaatccctatacggagaaaaagagaccgatcggctgctggcgtttatcagccgccaaatccggtcaagcgttcgggaaacagacaaaaaattcaggccgtccgccgaacggttcggcatcgtgctgacccatacgcctgaagaaaacatgccggccgttctggcgaagctgaaaaaggaattggatacgtaccggctgcaaaacggtaaatacgtctccatcaccttccgtgtatgttacttggcgtaccgaaaggatttacaaacggccgagcaatttttaaatgaactggaaaacgagatgatgatgaatgaactctaaatggatacgtctcttactctcggcgcttttcatgatttcggcggtttatgttccccgtccggcggaagcaaaagacaaaaaggacggcattctcattatttatacaagcacggacggcaaagaaaccgctgaggtcaaaatgcttgatctgaccgcgggccatttctcatccgccgtcaccgtgaaaagcgacggagacatcacagccgcggacttcaaaaagaatcggcgcgtcatctattacggcgtcacgaaaaaaaagctcagcacatcatttgtgtcactgatcagcagcatgccgcagcagcttatcagcatcggctataacgccggacagttccgccaatttgcggggttgtccctgacagaaaaagaaacggtataccgcatttacggcaaaaaagaaaaaacagacatgccgcttgaaaagggggtgtccgtgctcggcgtatcgggagtaaaaggaaagtccctttatacataccggtccggtgacggcagcacccgcccttttatgtggaaaacggcgcgctctgactattatttcggtgtgacgagcctgttaaatgattcgtttctgacggcgaaagcgatgcgcagcgcattcggagaatcagagggcggcaccctcctttatttgcggcttgaagacatcagtccgatgtcagatgaaagattgctttacgaagcgggcgcttacctgcataaaagacacattccgtttattctggcggtcattccggtctatctcaatccggaaaacggagaaaaagtatacctggcggacaagccaaaaatggtcagcgtcctgaaaaaacttcagcaaatgggcggtagcatcattattcacggctacacgcacgcataccgatacagcgaaacgggagaaggctttgaattttgggatgccaaagcggatcagccgattacgtcagaaaatgcggatgatactccggtcaagcttgaaaaggaacaggattttccgaatgaaaaagcgtaccgggcgtatgtgaagcctttccgtgaaaaagaaaacatctacacgagaacgaagctggagcaggcgattgacgatctgacagagctcggcctttacccgctgtcattcgaagcgccgcactacacgatgtctgaagaaggctacaaaatcgcatcttcttatttctccagcattttcggacaagtgcagctcagcggcgcgacgtggaaaacctcgggcgcccctccgttcgtctcaaagccggctatgctggacgggatgacgctgtaccctgaaacaatcggttatgccgataactcaaaggaaaatccgctcggagatatggagaatcatatttctcagatgattgatttcggcggcggaacggcgggcggtttctaccatccgtatctcggcatgaaataccttcccgagctcgtcaatcagatggagcggattcccggcggcgagtggctcgatctgaagaaaacgaagcaaacggtaacgtcggacagcgtcaggatcaaaacggacggagacggaaccattcatgtggaaaacaagattcatccggtaacggcctttttcaatcatcaccagcagacgcctcttgaaaaagcgctttggattctctccggcgtggtgttattgtttatcatcatgttcgcctgctacgtcctttatttgcgcgccacattaaaaaaacgaatctttaaggagagaagaagccttgagtaacattctgttttttatctcattaagtttaatatgggtgatgcttctctatcacatgtttctgatgcagggcggattcaggcattatatgaccttcgaacggaacattccgaaatggcgcgcaaagatgggggagctcccgaaggtcagcgtgctcatccccgcgcataacgaggaggtcgtcatcaggcagacgctgaaggcgatggtgaacctgtattatccgaaagacaggcttgagatcattgtcgttaatgataattcctccgaccggacgggagacatcgtcaatgaattttcccgtcagtatgacttcattaaaatggtcatcacaaagcccccgaacgccggaaaaggaaaatcttcggcgctgaactcagggttcgcggaatcgaacggagacgtgatctgcgtgtatgatgcggacaatacgccggaaaaaatggcggtgtactacctggttctcggtctgatgaatgatgagaaagcgggagcggttgtcgggaaattccgtgttatcaatgcggcgaaaacgatcctgacgaagtttatcaatattgaaaccatctgttttcagtggatggcgcagggcggcagatggaaatggttcaaaatcgccaccatcccgggaacgaacttcgcgatcaggcggagcattatcgaacagctcggcggctgggatgataaggcgctggcggaggataccgagctgaccatccgcgtgtataatctcggctatcatatccgctttttcccggcggctgtgacatgggagcaggagcctgagacatggaaggtctggtggcgtcagcggacaagatgggcgcgcggcaaccagtacgtcgttcttaagtttttatcccaatttttcaagctgaaacgcaagcggatcatcttcgatctgttttatttcttttttacgtattttttgtttttcttcggtgtgatcatgtcaaacacgatttttatcatcaatcttttttacgacctgcatctgacagtcgggtttttggcgatgattttgtggatactggcctttttcctgtttatgactgaggtcatgattactttaagcattgaaaaaacagaaatgaacaaacaaaacttctttatcgtatttctgatgtactttacatactctcaggcttggatcgtgctcgtcatctggtcattattcacagagatcaagcaccgattgttcaagcaggaagtcaagtggtacaaaacggagcgatacaatcaaaataaaagcgggtgacctttttgaaaaaagcgatattgataactggccttttgctattgatgtataacgggcaggcggccgcggcccgggagctgaaaacggacggttccgctctcggaacaagcgccggcgcaaaagagcagcaggcgctgactggcgatctgatgacactgtacggggcgaaagacagctcagagctgacctatcagattcctgcgggagcttcgaatgccgatcagtcgcttctgattgattacgaggcgtcaaacttattaattgccccgtcttctttaaccatcgccattgatgatgaacccgtcaaatccataaagcttgacggcagctccaagcggaaaacggtgaagctcaatctcagcaaaagccaatccgcccaaggctatcacaatgtatcattacgattttacggcgtattaaaagagggcgtctgcgtcaggcaggatacgtcaggcaactggataaaaatttatccggacagccgccttgtgctttcagaagcaagcaagtcaaagggagcggatctcggccatttcccgtatccgtttgcccaatcaggcaatacgggtgaagaaaccgatattatccttcctgacaaaccgacctcggcggaagctgaagccgcagtcaaaacagaaggatttctgaaaacggcagacagcaggctgaaggtatcctatgtaaaagaatccgatgccggcaaaatcagcaatccgtcaattgtcatcggcgctgatcagcattggaacgggaaaataaaagagcttttcgaacgggggaacttcaaagcggaagacaacaaactccttctcgccgaacgggttctgacatcaggggacaaacggcagcccgtcctgtttgtcacggcgcactcagacaaaacgctggcggataaaatccgcgtcatcacagacagcgcttattcaagccagctgggcggagatactttgacaatcggccgccttcagcccgctgcggaaaagacaggcaataaactgacattagaggacttcggcgcgggaaatgtaacggtcggatcaaacaaaacggcgtcagagcacttcttttaccctgcggcggccgctgttgataaagacggtaaggtcaagctttcacttacattaaagacgtcggaatcgatccggacgaaggcggattcagctaatgacgccgagagagcggagctgaacgtcatgatcaacggacagccgaatgcggtgcgccttgatgatctcggcaatcaagataaagatggcttttaccacgtctcaatcccgattgatccgaagcttttgcgaagcagcaggtacattgatctgcaatttgtcacatcaggtttgaaacataacaacccgtgtattgaccgtgacgaaaataaatgggtctatattgataaaagcagcatgctgacgtatccggtaagtgatgcggcgcagaaagcggatttcgggcaatggccgctcccgtttgcgggcggcgtgaaagagaaaacagtgatcgtcatcccggatgacgtaaacatacagacactgaaagaactttctctggtggcggattcattcggaaacggctttaccgtaaagacggcatcagacatgaaggaagcggatgccaaaggccggaatgttgtgtttatcggaggcctgccgcaaattccgcttttgaaatcaaacgcctctaagcttctcgtgccgtcagaccgcagcggcgcgtacgatgtttcttcgtttcagatgctgaatgagacaacgaaacaagtcgcgtttacccaggaatcaccttgggactccggccgaagcatcgctgtttttgctccgttatcaggcagcggcgcgtctgtcacaaaagagctgatcagctttttagacagcacaagcgatgccgcaaccgtcgtcaacgaaacggccggcaagcagctgttttcaaaccatcagcaaatcaaatccgacgacagcagtccggcgcctgatacgaaaagccgttccgcagcactgaacgtcacgtatatcgctgttttcgcggcgcttataattattgcggccggtctgatctggctgacggcaagaaggaaaaaagaaaagcggataatgaaaaaagtgaagagtaatgaaggaaaaagaggccgttaacaggcctctttttttgtatttttatttccatttttggcggtgatttttttatttttgaaacagcataaaagcccctttacaactgaacgggacgggagtatgatctcttttataatctatatcgcttaatctgtaatcagagcgggggaaccaatttgcggcgcgtcatgccgcttggggtgaatcctttttcaggtagggccaactctcatcagcccgaatccgacagctaacctcgtaagcgttcatgagaggagatgaatgaaacctgtgcacgattatggcgcaggggcatccgtttgcctctgtgtctttttgctgtgccgaaatatggcatgcaatcgttattcagagacatcatagcagtaagggtttgtaaatcaaacggaaaatgaaaaaaaggggaagacaaaaaatgtaccattcaatcaaaagatttttgattgggaaaccgctgaaatcacaggcggccggagagcagaaactcacgaaactcaaggcgctcgccatgctttcttcagacgcgctgtcatcagttgcttacggaacggaacagattctgatcattttggctgcggtaagcgcggccgcgttttggtattccattccgatcgcagcgggtgttctcattttgctgcttgctttgattctgtcctacagacagattatttacgcttatccgcaaggcggaggcgcttatatggtttctaaagaaaatcttggtgagaagcccggcctgattgcgggcggctcattgcttgttgattatattctgacggtggcggtaagcatttctgccggaactgacgcgattacatcggcatttccggccctgcacccgtatcatttgctcattgctgttttgcttgtgattctgattatgattttaaatttgagagggctgtcagaatcggcgtccattttggcgtatcccgtctatctgtttgtggcggcgcttgtccttttgatcgtcgtcggtctgtttaagctcatgacgggccaggttcatccggccgagcatacaccgatcggcacgcccgtagcgggcatcacgctgtttttgctgctgaaggccttttcatccggctgctcggcactgaccggtgtggaagccatttcaaacgcgatcccggcctttaaaaatcctccggcgaaaaacgcggcccgcactttggccatgatggggattctgctggcgatcttatttacggggattacggtgctggcgtacggctacggcacgggtccgaagcctaacgagaccgttatttcacaaatcgccgcggaaaccttcggacgccatacggtgtactatttcattcaaggcgtgacatccctgattcttgtgcttgcggcaaatacgggcttttccgcttttccgcagctggcgtttaatttagcgcgcgatcagtatatgccgagaatgtttacggtacgaggcgaccgattaggattttcaaacggaatcatctttctcggtatcgcgtccatcctgctcattcttttattcggcggccgcacggaacatttaattccgctttatgccgtcggcgtgttcattccgtttacgctgtcgcagacgggaatgtgcatcaagtggatcaggcagaagccgaagggctgggcggtaaaaatgctgatcaactcatgcggcgccgccatttcatttatggtgctgtgtattttattcgcgacgaagttcaatcttgtctggccggtgctgttattcatgcctgctgtcgtcatgctgtttttcgtcattaaaaatcactacaccgcggtcggcgaacagctgcgggtcgttgatcagcagcctgaggaaatcaagggaaccgtcgtcatcgtgcctgtcgccggtgtcaccaccgtcgtccaaaaatcgattcagtatgcgaaatcattatcggatcaggtcattgcggttcatgtttcctttgacagagaacacgaaaaaaaggtggaaaagcgctgggaagagcttcataacggcgtccgcctcgtcaccctgcattcctcataccgcagtctggttcacccgtttgataagtttttggaaacggtcgaacaaaaagcgaaaaaagaacagttctccgtgatggtgctgtttccgcaatttattacgaaaaaacgctggcagaccatccttcacaaccaatcagccttcttgctccgcgtccggctgttttggaagaaggacatcatcgtcgccaccctgccgtatcattttaaaaagtaacggaaagaccgcaggctgaaatgccgcggtcttttttgtaaaggaggacgacatggcacaaggcgcttttgtcatcatacaaaatgatgggcgggacatattgctcgtaaaacgaaaagacgttccactatgggatttgcccggggcgggattgaagaaggtgaaacatctgaagccgcagccgtcagagaggcctttgaagaaacagggtataacgtgaccatcctgcaaaaatccggtgagtatgaaaggccggcatttgaagatacacagcacgttttcatcggagccattaccggaggaacaccgctgatgaacggatcggaaaccgccgatttacgctggttttcccaaaaccggctgccgctgttcatggtgccgaacagaaaacggcaaataaaagacggactcaatggggcggcaaatcgtaaggcagtccttaaagaccgaaatctgttatccatccttgatctgctgagaaaaaagctgagagtatagcccgtgtttcaacccgtatgaaaaaggggatgaatacaggtaaaaggaggatgcagtatgccaagtaaaacagcaggacacgtaatgacggagctgcttgaacaatggggagtcggtcatatatacggcattcccggagacagcattaatgaatttatcgaagaactgagacatgaacgaaataacctgacattcatccaaacccggcacgaagaagtcgcagccctggctgccgcggctgaggcaaaactgaccgggcagatcggtgtctgcctttcaatcgcaggaccgggggccgttcatctgctgaacggtttatacgacgccaaagcggacggcgttccggtgctggcgattgcgggacaggtggcttccgatgaaatcggccgtgacagctttcaggaaatcaaattagagcagatgtttgaggacgtggcggtattcaaccagcaggtacatacggcagaagcgctgcccgatcttctgaatcaggcgatccgcacggcttacagcaaaaaaggcgttgccgttttaaccgtttctgatgatttattcgcgcaaaaaatcaaacgggagccggtttacacatcgccgatatacctcaaagccgatatagagccgaaaaaagaacatctcgtcacatgcgcgcaatatattaacaacgcaaaaaaaccggtcattcttgccggccaagggttaaaatcggcaaaagaggagctgctcgcattcgccgataaagcggccgctccgattgtgattactcttccggcaaaaggcgtcgtgcctgacagccatccccactttctcgggaatctcgggcaaatcggcacaaagcccgcctacgaagccatggaggaatgcgatctgctgatcatgctcggcacatcgttcccgtacagggattatctcccggatgatacgcccgccattcagcttgattcggatccggcgaaaatcggcaagcgctatcccgtcaatgcgggaatcgtcagtgatgcggctctggggctgaaagagctgacggaatacattgaatataaagaagacagaagatttttggacgcctgcaccgagcacatgaagcattggtggaaggaaatcgaaaaggatgaaaccgaagcgactcatccgctcaagccgcagcaggtcattgcccggcttcaggatgcggccgcagaggacgccgtcctgtcagtggatgtcggaacggttacagtgtggatggcccgccattttaaaatgaagaagcaggactttatcgtctcaagctggctcgccacaatgggatgcgggcttccgggagcgattgccgcaagccttgccgaacctgatcggcagtccatcgccatttgcggagacggcggattttcaatggtgatgcaggatctgccgacggctgttaaatataaactgccgattacggttgtcatattaaacaacgaaaatttaggcatgattgaatatgaacagcgggtcaaaggcaacattgactacgtcacccagctgcaaaatatggattacgccgcctttgcagaaagctgcggggcaaaaggcatcaaagtgacgaaacacgaggaattggctcccgcttttcatgaagcgctcaactcaaatgagccggtcgtcatcgacgccgtcatcggcgacgagccgccgcttccgggaaaaatcacttacggccaagcgaagggcttcagcaaatacatgctgaaaaacttctttgaaaaccaaaaaatcgaaatgccgtcactcaagaaaagcttaaaacggctgttttaagaagccggtggttataaaaaaattaacaggcagcatgcctgttaatttttttaggctttcttattgatgattatttctttactgacccccttccatggtaaggaagtggtcagcagtttgacccgcttggaagcttagaggacgggaaccgtaaccgaaagtatatcgtattaaaatctgcggaaacggtaaagaaaatcgtaaaatctgcagctagcaagcgatggctgataaaaaagcttttggagggccaggacagttcataacaaacgtggttcgctcattagcatcgcacagcccttatcagcaaaaacaggaacaaagactggcgtggcgacgtacaccgtcaagaagggagatgtcctccctgtaattgcacagaaaactgccgtaaacatggccaccatccagagattgaacagtatcaagggcccgaattttatcaaagtcggccaagtattaaagctgacggactcggccagctctccaacaaaaggcaaaaaatcatcttacacgctgccatcgggcgtttttaaagtgacaagccccttaactaagggaacggccgtgaaacagatccagacagctttggcggctctctattattatccggacaaaggggcaaagaacaacggaatagatggctattacggaccgaagacagcaaatgcagtcaaacggttccagtccatgtatggactgcctgctgacggcatttacgggccgaaaacgaaagcaaggcttggagaaatgttaaaaagggaataaaaaagcaggctctaaattgcctgcttttctttttattagcctaatttctcttttgagatcttatccaaattagtaaaaagtatatccaggcccgaaaataagaaagttatgaagaatgaaagaagaatttctccaccttgaaatatagatatgttttcaatgaaattactggaaacatatttaattgagaagtaaacagcagcccatgcaaaaatgaattcaagtatataggctaaccaagcaggtaatttaaaaatatgagtaattccttttacaattgccataaggattagcatataaattaaagctaaaatacttacgacaacagaaaatatgtataagtctgaaagtgaaccatagatgatatactctccgaaaaaatgatttacagttatagctacaaaataaatacctaggctaggtacagttatagcgaagaacagggagaatccaataagccctatgaatgctatatgagctaagtggttgggtggtgtatccacaatctccttttttaatagaatcataaaaataagagatgaaataacaagacagcatagtatggtgagcaatacggtaataaagatagccatgttaacctccaatgaaaaagtgctattagagtgaatctaacagcactttaaattttaaatatgttaaatcaaagcaacaatgaatttagctaaagtggtagctacatctgtaggagctccgatagctttaaaagcttttgtaaattgttttacaccccaattttcacctttatccataatgtcggcaaccttcttagagttttttctaatccatgccgcagctttaggggagaatggctttaaggcttttgataaaagccatccacctgaacggcaggcagctctgaaagccttataggaccacgaaactacaccttgggtttggtagtcaccattgagagccgctttggttggaatagtgccaggcattccagttggaatagtacctggtgcagttttcgttaccggtacaggagttgtggttctgttttcagctgctaaagcacctgaagtacccaagaatgatgtaagtagagttgcgcttaaaactacagggattactttcttcttcatatatattttcctcctaataatttatgaataacaataaaatgtttcatcgctaacgttgtccaatgagcgaggcttttagccttgtcagaaagtccagactttttaagtgaaagataaagattctctccacgtcaatacaactcaaggcaacatattcgtttaatagcttctttaaaaccagtttaagctaaaaggaaaacggcttatcaattattataaaaaattggtttggtaattccagtggcattagtagtggtatctcggttttcttcagctcaggatgtggggacaaaagaagcagttacaagggctaaagatgtggcgaatagaataccgttagctacgtgtttaatgaaaaatcctcctttaggaatgtaatctgccagcgaaatgaaagactatgtatttaggatagtcctatattattctctttgaatatttttccacctccttcagaaaccattctatcaataggtattttttgggtaaatagtatttttatacagtatttttatgttgaggtataatttccctgtgtcttaaaacaagttaatcaggtgagtatgacgcaaaagtaaattgcggttttttttcgttttcactttatgttcaaatagttataatattacaaaaatagcaattagagggagaggtatatatggatcaagttttaccgtcgtcccaagttggtgtcaagatcaatgaatggtacaaaatgattcgccagttcagtgtgcctgatgctgagattttaaaggctgaggtcgaacaggaaatagaggagatggaagaggatcaggatttgcttgttttttattcattgatgtgctttcgtcaccaattgatgttagattccttggagccggaagacagatatcgagatcgccccacagtcgacgaactacttgaaaaaatagaaaagccgcaaaaaagacttacaggcctcttgaagtattactcattattttttcgtggaatgtatgaatttgatcataaagagtatgttgatgcgataagctattatcgcaaagcagagagagagttgaatgctgtatcagatgaaatggagcaagctgaatttcattacaaaatagctgatgcctattatcaaattgatcagcactttgtttccctcaatcatttaaaaaaagccaagcaattgtttgaaaaaaatcaattatacaaagtgaaagtgattggctgtaatatgatggtcggtgctaacatgtacgatatgtacaggctgacggaggcagaatcatattatcgggaagcattaagtaacgcccgtggcttggatgaggaaaaagtgaaaagaattatcggagtgatctttcataactcaggcttagtttatttaagagggaaaaatttgattgctgctgaagagaatttcaaaaaggcaatagacgtgaaagaacatattgatacagtgtatggagtgagatcattatatatgatggcgaatgtcctgtaccaatgtgataaagccaaggaagcacgtttcttttatgaaacggctttaaatcgtgctcggacttctaatgaagaggaatatttggctaaattaaaaatcattaattcattgtacgaagaatataatgaaacagaagtgaaacaaagcttaggttacttggaagagaaacgcctttggtctgatttcgcagagctaaccgaaaaattaggtgactttcattttgagaagagaaactatgcagagggaagaaactttttaaagaaaaccatacatgcccaaacacaaatacttaaggttacggaggctatataatgaagaaacttataatcagctccgctttaatcggtattctttttactggattattaagtgtgacaaatgtttatactgctgaaatgagtgactctggaactttttatatcgctgaaaaagctataaatatttaagtgttctccaatttttgacctccaccttttaagactgggggatttctttttcttatccagtaatcaacatacgctgcctcataaggttcttaaccgttacttgtattgcgttcacctttccgttttgctgtgaagtgttttcttgaacgatgcatgcatgagaaagacgccgtccatttttaagcctatcttcaatcattcaaggacaaacaaaagagctatcgagaagatctcgacagctcctttgtttgttgagcggcttgcttgcatatagtcgtcctaaacgaaaacgatgattgtgaaaatcggcagctggcgagcgatggctgatcaaaaaactcgtgatggatcagcgcggtttcatctgaagaacagccagagagcggtcacaacagcgatcataaagtaatctccatcattcagtttagttccatttttgacaaacacatgtgccgtccggttcgtctttgtccctttcggagttttaagcgcaatgttcttccctatattgtaataaacaactttaaacaaataatatgccagcgaacagaataaaaagagcaacatgaacttgccaataaacaatatcatgtttcattactcctttttgccgttttttcgtttgaatatatgacggaaaagtcaggatgttatataaaaggagaagtattttaccgaggctggtgttaaacattaatgaacggttcgccgcaacatccccagatccggaacaatttcaaaacgaaagagaagcccgaggattattaaaaacagaccctaatttgtccgcttttttttgaacatttgatccaagatgaacataaagagagtgaataagaaggacaccgtaatcatatctatcagaaatatattaggagtatcttttattaatagcagccataccacctgcaaaactaaagaaatagaaaaataagatatatatgtcatgatcctcatatttgttacccccttagcctaatttctcttttgtgatcttatccaaattagtaaaaaggatatccaatcccgaaaataagaaagtgatgaacaatgaaagaagaatttctccaccttgaaatatagatatgttctcaatgatatgattggaaacgtattggattgagaagtaaacagcagcccatgcaaaaatgaattcaaggatataggctgaccaagcaggtaatgtaaaaacatgagtcattccttttacaattgccgtaaggattagcatataaactaaagctaagatactgacgacgacagaaaatatgtataagtctgaaagtgaaccatagatgatatactctccgaaaaaatgatgtattgttacagctgcaaaacaaataatcaggctggggacagtcacagcgaagaacagggagaatccaataagtatgatgaatgctgcatgagctaagcggtttggcggtgtatccacgatctctttttttaatagaatcataaaaataagagatgaaatcacaaggcagcataagaaagtgagcaaaacagtaaaaaagacagtcatgtgacatctccaatgaaaaagtgctattagagtgaatctaacagcactttgcattactttatacgtattttcctgacgatcatttatgaatgattttaaaatgctttcattgctaaagttgtcaaatgagcgaggtttttagcctggctgtcagaaagtccggactttttaagtgaaagataaagattcttttccacgtcagtccagcttaaggcgacatactcgttcagcattttctttaaaaccggttcgatgtgttcattgaaaacggattcgagttcatttcttattttctttcctgctaatttttcaacaagattgaataattttgttttatttttcagcacttctctgattacatctttgactggttttgacacagatgcatcgctttgtgctttaagtccgtaggaaaattgcgtatcagtctgataaaaaaatgattttgtcgttccagtggcattggcagtattatgatgattttctttagctaaggatgcggggacaaaagcagtagttacaagggctaaagatgcggcaaacagaatgcctttagctgcgtgtctaatgggaaatcctcctttagaaatgtagtgtagagagaaatgaaagactatgtatttaggcgggacctgtatgatccgctttgaacatttttccctctcagataccattctatcaataggtattttttgggtaaataggattttaatacgatatttttctcgcaattcaaaatttttttttggcaggatttattttagctgcagtttcgtgaaatgaacatgggctggagcctgcatgtataggctgattgaggcggaatcacattatcggagcggtttttataatgcaggcttaggtaaaaaaaataaacaggcggcatgcctgtttattttcgtttgcgtgagagagcgaagaaaaacgggaaggcggaaccggccaaaaacgtaccgaataaaaacatgcctccgatgaacacatgatagttcaccccgccgatccaaagccccgtgattaaggaaacgatacttaatgcgatcatcacaaagccgggaatcagacgtttcttacccgttgtccgataagcaaaaagagaacagaagataccgatgacaatcggcacaatccacagataaaaaaggataaatactgacataagcaaaactccgatttttcttctatcataccaaaaacgcccggaaaaagatacgaacggcatccggcgtcaaaagaaaaaccggccgctacggccggtttttttctaacggaatgaatcgtagatcacaaacagattaagcgcgatcaccaaaaccgcaatcagccaggcgagagccgtcacccattttcggttcgtcagggcgcccatcaggcgtttgttgcttgtaaacataatcagcggcacgagcgcaaaggagatgccgaatgaaagaacgacctggctccatacgagcgcttctgtggcgttgacccccgagataatgatgatcatcggcggaatgatggtaatgaaacgccgcaaataaagcgggatacggtaacggatgaagccctgcatgataatatcgcctgacaatgtgccgacagaagagcttgaaagccctgcggccagcagcccgatcccgaagagaatggctgaagccggtccgatatagtggccgaattgctgataagccacgtctaaatcttctacatacagcccgttcttgaagaaaagcgcggcggcgacgatgagcatgcttgcgttaatcgccccggcgatcaccatcgcgatgagaatgtcaatcgtctcgaatctaaaaatctttttccgctcattatccgtttttccgacgacacggcgctgtgtcagtgcggaatgtaagtaaatggcatgcggcatcacggttgcgccgagtatcccggttgccaagagcacactgtccattccgtcaattttcgggataaacagcccttcgagaacagagccggcgtcaggtttggcaaagaaggtctgcagagcgaaggcgatcaccacgacaaacagaagtccggcgatgcccgcttccagcgcccggtaaccccggcgctgcagctctaaaatcgcgaatgatccgatcgccgcgataatggccgcttcaaccatcggtatgccgaacagcaggttgagcccgagcgccgccccgataaattctgccaggtcagttgccataatcaccagttcaccctgtatccacagcccggcggatacccatttcggataccggtctctggcgatttccggaaggtttttacccgtggcaatgccgagcttcgcggaaagaacttggattaaaaaagccatcaagtttgaaaagaggatgacccacagcagcatatacccaaatttcgaaccagctgagatattcgtagcgaagtttcccggatcaatgtaggcaatcgccgcgataaaggctgggcctaagaaaggcagaagccgcttgaatcccttgcttttgccgtcaagtgcatcctgcacggcttttgcttgcagtgattgtgctgagatgtctttgctcattatgtctcacctaaattccgatagatttttagctaaataacaaaaagtttcctagatgcaaattattttatctacatcataaatccgcttttatgagatgtcaagttctttatgttcaataaaccggtacattgatgccctgttttatctatgatatgtatcccgccgaagaaaggtccgaaaatgaaaacggcatcgttccgggaaagaagcgatgccgttcgcaaagcatgtttccgcgtccgatcatgcgcggatgcgttgagcgttcttttaaaaaggtgaaaagagaacacttgctcatatcacttcacaactttctgtccggtgcaactgatcctgagaaaaagacgcagtatttcctccgtttcccgggtaaatagaataataatgtttctttccattggaagataaaacctttctgtaccattcaaatgacctccggaaaaactccggccgctctgaataaacgtttgaatcaacgatatatcagtgattccagtccaataaacggctgttatctatcaaaaaaagaatcggcatggtcacttgcgaagaaaagaagttggagcattagacttatttcagtcttccgggcaaaaaagtataataacgtcaggaaagctttccggccatatgataaaagagggggaattttcttggtacgtcgtttgtcgatcatttctttagccatgatttttgctgtttctttattcgcttttggcggctctgcatcagcagcagctttcaaacctaaagctgaaccggacgtttccattttagccagcgggggcacagtcggtatttacggtgctaatatgcgctcatgctctaaggtcagctgttcaacgatcacaacattctcaagcggtaaaaaaattacaggttcttgggtcaccggagaatatgttcaaggccactacaccaattccaataaatggctgaaagtcacgtatgcaggagcgacaggctacgtttcagtcaccacactatcttattattacggtttataagcagaaaaacctcgttctcttgagagcggggtttttctatattccgattcaatttccgcgtttcgtttcatcatcgtgtttcatcagctgatcgatttcttctttagaagcgttttttttccactctttcgcctgacttgtcgcaatgggaatagcccgtccttcttcataaccctcatctaccatcgcattcgcgatttcgatcgcttttttcttcacaggttcctcgagattcttcaatgattgcggataatccttcatagaccaaggcatgtctatcactcctttatgaaaagtgtttcccgcctgaagaaaaagaaaaccgcctcatcaaaaagaatgacagctatttttacgagagaccagcaatttccgaataaaatataaaggataaagaagcaagtacagattgaatgcccaccacatgagatcaaaatcaccgataaatacccaaaaggcaatcgcttgcaggcctgaacaaaaggtcagcacaagtgatattaatgcgaaatggcgccataacgaatgtttccgtttataaagaaacaagctgtacagcccggtcaatgaaatgaaaatatctaggggaaagaatgaccagttccaggccattatcatggcgttatcataatctttaaacgccatgttttttggaatctactcaaaaaaagtaacaatccaataaatgataaatccaatatctgtaatgaggaagagaacctttaaccctttcatcacctgtttctgtccgtatgaacgctgatgccgtttgatgacgtttcactttcggaaataaagtttaaggaaacgacaccgatgatgatcagaagaacagagacagcttttataacagagaactgttcatgaaagaaaaaaattccgatcgcggaaatcagtacgatccccattcccgaccagaccgcatacgcgatggagacacttatatatttcaaagtcaaagtaagaaaacaaaggctgccgatataaaacaataacaataaaatacttggaacaagttttgtaaatccatttgataatttcatgctgatcgtacccaatacttcaaaaatgatcgctaaacttaaataaatccattgcatacagcattctccttcaatcgtattattcaaaattataaaatatatagaatttgaagaaaattaatcaatggaatgttttccggataaaaagtccggccgggtgtaaaaagaaaacgccataaaggtatactatgtagaaagaaatcagaaaggacgtgcaggacgggtgacagaagagcggacagacctggaaagacaactgagagacattcaaaaatgggaaaaggcgcagcagagggcgatgttctggcaaacattcacccgcttgccgtttcagcttttggacaagctgacaccgcaatttattcagaggaaaatcggactcattctcgatgaaacgggaacgtttattcagtcaggcggacagtaccttacatcagaaaagcgcatcatgaaaaagtttcaaaaacggctgccgcacggtacatgtcaaacgcttcacgacatccgcaatgcgccgcttgccgtcatggacgaaatcgcagaagccatagcgcgtacaagcgtaaaggccgcgacggtgcagggagccgcaacgggagtcggcggcgtgtttacgcttgcggcagacattccggcgatgctcggcctgtccttaaagacgctgcaagatatcgcggttgcttacggctttgatccgaaagacaaaaaagaacgcgtgtttatcgtcaaattgcttcagcttgcatccagtgacgtcatcggaaaaaaagcgatcctgcaagatttacggcaatatgatcaaaacgaccaaacctatcagcgcgtcgcctcgcaaatccaaggctggcgggaagtcgtttacagctaccgcgatacgttcgccgcgaaaaaactgctgcaaatggttccggccgcaggcatcatcttcggcgcgtccgccaaccgttcagctttagaaagcatcgcggaaacaggcatcatgctttataaaaaacgccggattctaaaacgcatgaacgatacagaatgataaaaaaccacccgaaaacacattcaatgtgttttctttgtttatcagttctgaaatcgggaaaccaacaaccaacaccaattaaaggaggaattcaaaaatggcacaagataataacaaaatgagcagagaagaagcaggtaaaaaaggcggagaagctacaagcaataaccatgacaaagaattctatcaggaaattggtcaaaaaggcggagaagccacaagcaaaaatcacgacaaagaattctatcaggaaatcggtgaaaaaggcggagaagccacaagcaaaaatcacgacaaagaattctatcaggaaatcggtgaaaaaggcggagaagccacaagcaataaccatgacaaggaattctatcaggaaatcggccaaaaaggcggagaagctacaagtaaaaatcatgacaaagagttttataaagaaatcggccaaaaaggcggaaacagacgaagcagctaataaaagcataaaaggcagacaacctgcagatcaaaagcgatccggcacatcagccggatcgcttttgattttgggaaaatcttgatctgagccgcaaaaccgatacaataaaatgaaaaaggggtttttcactcgtgtctgacatgctgaatttgctcgctatcgccataaagtcaaagaaaaacacgacaatttttcaatcgcggagatcaatgaccactgtgtgcgcctcgcagtgtttacgggagaatatgactggcaccatcaccctgactcagatgaatggttcatcgttctggaaggtgagctgctgatcgattttaaggacaaagaaaccgcagtgctcaaagcaaatgacagcctgctcatcccgaaaggcacgattcaccgcacccgctcttacgtcagaaccgtgaatctctgtgtcgagcatacgcatgcgaaaacagtcatcacagaggaacggtcatgctgatcaaaaagattgtatgtgaaacagacgctgcaaacgctgaagcatttgcgcaagcacagtcaaggtggggagcattatcatgtgtaaatggcttcgtcagacaggcaggcggctggcggaaaaacgcagacggcctgttcatcgcagagatcatcagcgtttgggaggacagacaggcctatgatgattttatggagaacgaacatgaccgcatatacgaagaaaacgagcagaaggctgcgattctttcaatagaagtgatgctgtacgagggggatgaacctgtcattcacgagctgttacatcaccccgacatccggtacgaaccggactggacagttgtgcgcacataaaaaaagcccctttagaggcttttttattttcgtccgggaagcgtgttgtggacatacggcgggacggggtccagcttagctatttcgccgtgcgctttcggttccttttcgtattcaaatggttctccgtccggcgctgtttccttcagccaattttgttcagcgctttctgctccatctgagaaatgaataagcttatgggagaatgactgtttttccagcgccttcgggaatgtggaaggaacgatcggaccttcctgttcttctaattctttaatggccgcaagccattggttttgatgcatggtatcgcgggccaataaaaagctgagcatatctttcacgcctttatcatcggtcatttcatacaggcgtgcgacttgaagccttccttgtgattcggcgttcagattggcgcggaagtctgccagaaggtttccgcttgcgacgatatagcctgcgctccacggaacgcccgtgctgctctccggcattgcgccgagtcctgagacaatggcatgatgcgggttcatcccgcctaaaatggacccgatgaccggatcatcagccgctttttcctgctctgccagcggggcgtcttctaacagtctcgcaatcatcgtcgcgatcatttcgacatggccgatttcttccgtcgcggtatccatcagaagatccttatatttttcattgcctcgtgtattccatccttggaacaaatattgcatggcgacggatatttccccgtattgtccccctaaaatttcctgcatcttttttgcgaacagcgggtcaggacgatccggtttagccggatgctgcagttttttcgtatgtgtaaacatgtctccatctccttttttgctctgtccctatttacttccccggcgggaaaagggatgaaacggagatgggcgtattggtcctgctaaggctcgcggcgcaaggataacaaatcctgcacaagcccgcggccgatcacctgttcatattgtccgtaaatcgggtcgaggcgtttcatccatgtgttcttttccgctttgctcagcacatgaatatgaatggatgaattcttctttatctcttcaagctggtctttattcattttctcagcggaggcttcgttccattccgtcgtttctctcatcgcctccgttaagatggttctcgttttttctgtctgtgaattccagaaatgctcgtcggtcatcacggcataaccgaggtacccgtgattgctgattgtcaaataatcttgaacattataaaattttttagaatagatatttgaaatcgtattttcctctccgtctacgagattgctttccaagagctgaaacgtggaattaaaggaatcctgccgcgggtgcgcgctgagcaggcggtactggtcttcgatcacgctgctcggcatgatcctgagcgcctgtcctttcaaatcgtccggagagaagatcggccctttatttgacgtgagctgcttaaacccgttcgtccagtacgccagtcctttcaaatgatgcttttctaaagaagcgaacaggcgcgtgccgattttgccgttgaggccttcttgcacggctttatagtttgtaaacgcgtacggcagatccaaaacaccccattcgggagacagtgatccgagctttgaggtggagggagcgatgaattgcacgtccccgttttggagggcgtttatttcttcattatctgaatagaggctcccgtttggaaatacctctactttaatggtaccgccggacttttgatagaccaggtcggcaaatttattcgccgcccgccctttaggtgtgttttcagccacgacatgactgaatttgaaaaccatttgatctttcaggccttcctgttcgtcatcataatacggttcttctgttgagaaacgatcatgaaagccgatgaataaagcggttccgataccgagtaccatcaggctgagacaagtcagcaagcttttcatcgaaaaccccctccgccattttctataacaagcataatcgggcgggccgttttcgtaaagagacggaaaggaagaggccaatgacgaaaaaaaagcttaccatccgctggaaaatcaccatactttcttatatcgtcgtgctttttacctttttgatcgtcggcatcgtgctggtcggcaatatccagcatacagaggagcgcgagctgaaaaaacggctgatgaataccgcgcggacggtatctgagatgaccgatgtcaaacgcgccctggagcagaaaaaacaaagggaagacgtgcgccatgcggtcgaagaaataaggatcatcaatgaagcggactacatcgtcgtcatggatatggatcatatccgctattcacatcccgtcagcacaatgatcggaaagcgttcaaggggtgaggacgaagccgcggcgttcgccgagcacatttatttttccgaagcaaagggagagatcggcaccgccgtccgcgctttttatcccatcaaagaccgggatttgaatcagatcggcgtcgtccttgccggtaaaacgctgcccggattcggtgaaattcttcttcagctgaaacatgaaatactgtttatcgttctgctggcgctcgggttcggactggccggctcctttttgctggcccgccacatcaaaaaacaaatgttttggctcgagccccatgagatcgtgagaatgtatgaggaacggaccgctacgtttcactcgatgaatgagggcgtcattgcgatcgataatcagcatcacatcaccatttttaatgaaaaagcgaagcagatattcaatgtcagacaagagaccgacggcaggctgatctgggacgtgttaaaagattcgcggctccctgaaatcgtcgagcggaaccgagccgtatataatgaagaaatccaagtcagcggaaaggtgatcatgagcagcagaattccgattgtcatgaaaaagaaggtcatcggagccgtcgccatttttcaggacaggacggaagcggcgaaaatggcggaagaactgacaggtgtgaaaaattttgtcgatgcgctcagagtccaaaatcatgaacatatgaacaagcttcacaccatcgcggggctgattcagctcggaaaatcagaaaaagcgctccggcttgcttttaaggaatcatcagaacaagaaagcgtcactgattttcttcatcaggccattcagaatgacgccgcggcggggctgctgttaagcaaaatcaaaagaggaaaagagcttggcatttctgtgaaaattgatgaaaacagcagtttctcggcatttccggagcatgtcgaccagcatgacatcgtcgtcctgctcggcaatttaattgaaaatgcgttcggcgcattcgaaacagcggacacggaggacaaacatattgacatcagtatcgagcaaaatgatgaagtgcttgctatattaatagaagacaacggaagcgggatttccgatcagcatatcccgcgcctttatgacaaagggtttaccgtcaataaaacgggaggaacgggatacggcttgtacctcgtcaaacaaatcgtcgacaaagggatgggcgtgattgaagtcgacacacggcagggacagggaacggcattttctatattatttccgatgaagggggaggaatcattcgatggacatcaaggtgctgcttattgaagatgatccgatggtgcaggaggtgaataaagaatttatcaccggtgtttcagggttcagcgtcatcgccacggccgctgacggagacgagggaatcaggcttataaaagatctgcggcccgggctcgtggtattagacgtatacatgccgaaaaaagacggaattaaaacgctccaggaaatcagaaaacaaaagctcgaagtggacgtcatcatcgtctcggccgcaaaagacaaagaaacaatccagcttatgctgcaaaacggtgcggccgactatattttgaagccgtttaagctggagcggatgagacaggcgctcgaaaactataaacaatataaacggaaaattgaagagcatgacacgatgtcgcaagagcagcttgacatgctgctgaaaattccgcaaaatccgtcccgggatctgccgaaggggttaaaccattttacgatgaatgaaattttgacctatatgaaacagcagacggagccgctttcagctgaagaagccgccaaagcgctcggaatcgcaagggtgacggcgcggcgttatcttgattttcttgagaaggacggccagattaagctcgacattcaatacgggggagtgggacggccggttaaccgctacaaattcgtccgctagccgagaccaaaaagaccaaaatgtccgttatgatcataagcttcccctcttcgtatgaaaacgctatcatctttgtatagacgcatcgagaggcaaggggagtagggatgaaaattttcaaaaatcttacggtgcaggtcatcacggcggtgatcatcggcgtcattgtcggactcgtttggcctgaggccgggaagcagatgaagccgctcggcgatacatttatcaatgcggtaaaaatgattatcgcaccgatcatattcctgacgatcgtgcttggcatcgccaagatgggagacatgaaaaaagtcggcaaagtcgggggaaaagcatttatttattttgaagtcgtgaccaccatcgcccttattatcgggcttctggtcgtcaatatcatgaaacccggtgagggccttgattacagcaagcttgaaaaaggggatgtctctcagtacacccaaaacgggggacaggggattgactggattgaatttatcactcacatcgttccgtcaaatatggttgacgctttcgcaaaaggcgacattcttcaggtcttattcttttctgttttattcggtgtcggcctggcggcgctcggtgaaagaggcaaaagcattattgatttctttgataaactgtcgcacgtttttttcaaaatcatcggctacatcatgcgcgcggcgccgatcggcgcattcggggccatggcctatacgatcgggcacttcggccttgattccatcaagccgctggcgagtctgatgctgtctgtatacgttacgatgttcctgtttgtatttgtcgctttgaatatcatttgcaaactattcggtttcagcttgtggaactatctccgttttattaaagatgaactgctcatcgttctcggcacaagctcttctgagtccgtccttccgcggatgatggataaaatggaacgttacggctgttccaaatcggttgtcggccttgtcattccgacgggatattcttttaacctggacggcacctcgatctatctgtccatggcgacggtttttctggcgcaggtgttcggcgttgatcttaccatcggccagcaggttacgatcattctcgtgctgatgctgacatcaaaaggcgcggcgggtgtaaccggaagcggatttatcgtgctcgcctccactttatcggcgcttcaggttattccgctggagggactggcgctgctcctcggcgttgaccgctttatgagtgaaggaagggcgatcgtcaacctgatcggaaacggaatcgccaccatcatcgtagccaagagcgaaaatgagtttgacgaagcgaaaagcacacaggccgtaaaagaaataaaaacggcggtataaaaggaaaggaacggcatgcatccggcatgccgttctttttttcggccgccatgagtaaaaaagataaatttgtttaaatttattaggaggtggacaaagaccttagcgtcattttgttatataatttacaattagagagtgaaagatgaaatctaagggctttttgtcctagcaggagtgtataaatggcggctatttttaaattttttcagcatccgggtgtcagacgtttttccgtttttcttgttttgactggggtgttagttgtattccgaagtatgattaatttgattttgcttacgtttatttttacttttctgatggatcggctggagactgtcatccggcacgtgttgaaccattttttccggatcagccagagggtggtcatcaccattttatatattgcgctggctgtcggggcgactgtcggaggctttgtcttttacccgattgttgccaagcagattgaacagctgattaagcagatcaagcacatcgcgtatcatcccgatgtcattccgttttatgatgagatatcgagcgtgttcggcgatatcaatatcggttcctatgtaaaagaaggttttaatgtactgtatacatacttggccgatatcagcactttcggtttgcaggtcgtgatgtcactgattctcagcatgtttttcctgttcgagaaaaagcggctcacggagtttatgaaaaaatttcagcacagcaagctgtctgttttttactacgaacttgcttatttcggcagcaaatttgcgagaacattcggcaaagtgcttgaagcccaatttattatcgcgctggtgaactgtatcctcaccttgatcgcattggcgattctgcattttccgcagctgttcggcctgtccatcatggtctttttcctcgggctcattcccgtggcgggtgtggtgatttcgctcattccgctcagcatcatcgcgtatacgacgggcggcgctgcgtacgtcatctacatcgtgctggtcattttcgtcattcatgcgattgagacgtacttccttaatccgaaactgatgtcagcaaaaacggaactgccgatcttttttacctttacggttctgattttctcagaacatttcttcggcatttggggcttgattatcggaattccgatttttgtgttcctgcttgatattctggatgtcgtcaataatgaggagaaggaaaaaaacggaccggtcccggataagacataacgacggctccggctcttcacgaatatatgactaatgttataatgcagacagtgcctatgtacgggcactgtttattttttgtgaaaaaggaggaaggctgtatgactgagccgattttacatattgaaggccttgacaaaacaataggcaaaaagcacattttaaaaaacatcagcatggatgtcaggcagggcgagatcatcggtttgctcggtccgaacgggtcgggaaaaaccacacttatccgaatcatcgtcggccttttaaagaaaaacagcggcacgattacaattaacggctttcagcacgatgctgatttcgaaaaagcgcttgaatccgtcggagcgatcgtggaaaatcctgaattctacccgtacctgacggggtgggaaaatctgaagcactttgccaacatgcacaaaaacatcacagaagacaggcttcaggaagtcatcgagcgggtcgggctcacaaatgccgttcatgacaaagttaaaacgtattcccttggcatgcgtcagcgtctcgggattgcacaggccattcttcaccgtccgaatctgctcattttagatgaaccgacaaacgggcttgatcccggcggaatgaaggatttccgcgatcacttaaaggaactcgcggagcttgaagggacgagcatcctttttgcgacgcatttattgcgtgaagtggaggacctttgcgaccgtgtcatcatcattcaaaaaggtgagatcaaaacagaggttgttctgcgcggcgctgcggaaaaagaagaaaaagccatcctcgacattcagccggctgacgaagccttcgaatggctgtcccagcagcaattcgttccggagaaaaacggcgggagcattaccgtcaccgtagcgaagaaggacatcccggcattaaaccgtgcgctcgtcggacaagactttctcgtgtattccatcatgccgtatgcggaatcgctggaggatgaattcatgaaagtgacgacggcgcttcaagaggaggggaagacgaatgtttaaattgacagcgaatgagcatatgaaactctttaaccgaaaagtctcattagtggcgctgattctgatggccgttctccaatttattatggcgcttgtcattaaacggcttgtcatcagttccggaacggatgagaatttcatcggctatatggcgtacgcccccgggctgaatattctgcttgaggcattaacgatcgtgatcgcggcaacgatcatttccgctgaatttgataagaaaacgatcaaatttttgttaatccgcccggtaaagcgggagcggatttttgtatctaaactcattaccgtatttttggtcagcttgtacctgtatgcggcgtactatattctgtctctgctgttcggcatggctttcttcggagtgtcggtgacatctgaatcagggacgcttcttgtgaacaccctgaaagtaatcggcacgaactgggtcgaggcgtttgcgatggcatgctttggcttgttgtgttcttctgtattccgaaacagcgcaacggccgtcattttgtcatttatcgtgctgtacggcgcaaaatcacttgtgacgattatgtcgctcttccaaaacaaatggggtagttttctgctgttcgcaaatactgacctgacgcaatatatgagcggggcgaagccgctgtttgcgggaatgacgccgttattttccgcaggcattatcattatccatatcgtattcttcttagccgtcgcttggtggagcttttgcaaacgcgatattcgggtataaagtaaaggaatgacatttttgtgaaaaagatcacgataaatcaataatttatgctattttgatttataataaaggtaatgacggaggtgctcacttgagaaattttattaccgcattaccgattgtgttattgcttggtttttcctttgtgtcattcatgtttcaattcgaacatcttgtttatttcaggcttgcgctgggtttgttttctacagtggggctgtttctcttatataaaatgaagacgggattccgttatttcatcatctacctgtatgcaagctggatcgtgcttgcggcggttaccgcgtttgaagagccgattttttcaagctttttctttggcgggcttgtgatgacgatgggttatctcacatatatgctgatttatctcgggctcaagcaggaccgcggcccggaagcagtctgaacgcgctattctatggaatagcgcgtttttttgtacagcctcacagttgcgaaacgagacttgaatctctataatacttattaactttatcggaattataatggggggattccagtgtctttatggatacagaatgaacggcagcgggaatggatggaaaaaatcggcctgcttgcagacgaatttcaaaaaacagccgcgcttgatgatgaggcgggccgttttcccgcggagaaaattcaaagactgcgcgacgcgggatatacggcgttaacggtacctgaggcattcggcggtgcaggcatttccgtttatgagatggtgctgtttcaggaacggctggcgcggggagacgcggccgtcgctctcggaatcggctggcatttatccgtcatgggtgagctcggagaaggaaacagctgggatgaaggtgtcttttcatttatcacaaaagaggtgaaaaagggagccgtcctgaacagggcagcgacggaacggcagaccggcagtccgacgaggggaggaagacccggcacttccgctgtcaaaaaagacggaaaatgggtgctgaacggccgaaaaacctttacaaccctttcactgactttggattatatgcttgtgacggcatggattgaagaaaaacaaacgaccggtgtttttctcattcataaagatcaggcaggcgtttcagtcgaagaaacatgggatatgattgccatgaaggcgaccggaagccatgatctccttttagatcatgtcacggtcagtgacgagcggcttgtggagcttatcagcgggccgagagcggcgaaagtgaatggctggctgcttcacattcccgctgcttatctgggcatcgctcaagcggcaagggactatgccgtccggtttgcatctgaatattcgccgaacagcctgaacggaccgattaaagacgtgccggccgttcagcagcgtgtcggggaaatggagcttgaattgttaaaagcgagacagtttctcttcacggcggcgcaaatgtatgatgatccgaaacgccgccctttcatcaaaagcgagctcggcgcggcaaaacatattgtgacaaatgccgtcctttctgttgttgacaaagcaatgagaatcaccggcgcaaaaagcctggagcgaaataatccgcttcagcggtattatcgggatgcccgggccggccttcacaatccgccgatggacgatgcggtcatcggcaaattagcggcggaagcctttgagcaataaaaaaaagagcctgaaaaaggctctttttatgtatggctgttgtgccggagcagtttttgatgcttgcggtcaattctgtcatagatcacattcatcagcttttgattattcataatggccgccttgttttcttttatcagctgttcgtatgtttttattttacgtttcgccatgagcccgcaccttccttacatatttgtattcgctttctaattctccgagcgataattcatataaatgccgttccgactttttgtatattccgttattgatcagcaaatggatcagatgtttttttcgtccttcaactgatgatctgagctgaggagaagacctcatgattaccctcctaatcaattgatattgagaatcattatcagttaatgaaattatacaatggacatattcatatgtaaaggaaaaataccgccaatttttcgacaaatagtttcccggggaataatgctgtcgaatattgcatttggtcagatcaaagctgctatttttccgcttttccatccatactatgaatgagaatggaggagtccttacatgaatgatcaaacggcaaacttaaaacggggcgaaaaaggcgcgattcttaatatcgccgcgtaccttatccttgccgccgtcaaactggtgatcggtcttatttatcattccgaagcgctcagtgcggacgggttaaataatgctacggatattgtcgcatcactggctgtgctgatcgggctccggatttcccagcgccccgcggacagtgatcatgcctacggacattatcgggctgaaacaatttcttcattaattgcgtcttttattatgatggcggtcggtattgaagtgctgatcggaggagcaaaggcgattgtcagcggaacggaggccgagccgagcttcattgcggcatggacggcgctaggaagcgcgattgtcatgtacggcatgtatgtatataacagccgtcttgcggatcgggttaaaagttctgcgcttcatgcggcggcgaaagacagccgttctgacgcctatgtcagtattggggcgttgataggcgtcttaacggcccggcttcatctgccgtggattgatccggtcattgcttttctgatcggaattatcatctgtaagacggcatgggacatcttcaaagatgcttcccactcattaacggacgggtttgatctgaaagatttggagccgtataaacacacagtgaaagaaataaaagaggtcagcaggctgaaggatgtgaaagcaaggtatttggggagcacggttcatgtggaaatggtcattacggtagatccgggactgtctgtgaaagaaggccatgaagtagccgatgaagtcgaatatgcaataaaacatgaacatgatgtgactcatgtccatgttcatgtagagcctgaagtcataaacaaagatcgtgaaacgaattaaatatgctgtgataaaaactctgtgacttcttcgggcgttttcgcgtttgcgctgtgaagatgcgctttcttttcgccgtttttaaagatcagaaggctcggtatgcccattacctgatatttgtcggcaagctcagggagctcgtctctgttcagctcataccaatcattttgattatattcttccaaaatatcgccgatgaacatattcatgcgcgtgcagtcagggcaccaatcagcgaaaaatttcacgatgatttccttgtcggattgaataagttcattaaattgttctgttgtactgatttttttcatatgacacatctccttttccatgccattttaatataaaataaaaaggaattacatacaaatgctttcatattcagaatgcccaaaaataattagatcattttctgaggaaagtgataagatagtaaagatgaattgttgtggggggaatatccattgaaaacaagtctaggattggtgtacggcggaaagtcagccgaacacaatgtatcgctgcagacagcattagctgtaacaaaagcgcttaatactgagaagtttgatatacatccgatttacatcactgaaaaaggagaatggcaaagaggcccgctgctgactgagccggtttccaacgtgaaaatgcttcagctggaacaaaacggtgaaagtttcgctctatcagcattgaaccgggaaatgtttcctgaagcgtcgcctgacgaaaaggcgcagatcgatgtcgtatttccgcttctgcacggaccgaacggtgaagacggcaccattcagggactgctggaattgctgaacgttccttatgtcggcaacggagtgcttgcatcatcagccggcatggataaagtcatcatgaagcatttgttcgctcaagcggggcttccgcaggcgaagtacgccgctttcttaaaaaaggactggaaacagacgccggacagctgcttacagcaggttgaagaggagctgggatatccgtgcttcgtcaaaccggcgaacctcgggtcaagcgtcggaatcagcaaatgccgaaatcgcgaagagcttgaaaaagccttcgaactggcttttgagtatgaccggaaaattgtggtggaagaaggaatcgccggcagagaaatcgaaatcggcgtactcggaaatgacgaaccgaaatgttccgccgtcggtgaaatcacgccgaaaaccgacttttacgattacaaagcgaaatatgaagacggcgacacggatttaatgattcccgcgcaagtgacggatgaacaatatgcggaaatcagcgagatggcgattaaagccttcaaagcgattgacggatcaggccttgtccgcgccgatttcttcctgaccaatgacggtcaagtgctcattaacgaagtgaacacaatgccgggctttacgccattcagcatgttcccgctgctttggaaagaagcaggcgtagattacagtgatctgatcgaacagctggttgagctggcaaaagaacgccatgccgaaaaacagctgattaaacatacattttaatgaagacggacactgcctgaaggggcagtgtcttttcccgtaacagacaacattttcagaaagcgaggtgccacctttgataaagcgaactgtaaaacgaatcgccgacatggtcaaaggcacactgacaaatcctgtatttgaacaaacaatgattgagggcgccgcaaccgatacgcggactttggaaaaaaatcagctgttcattcctttaaaaggcgagcattttaacggccatacctttgtgccgcaagcattcgaaaaaggcgtttccgcggtgttgtgggaccgctctgaaccgaatccgccggaagagcgtgccgtcatccttgtcgatgacacgctggaggcgctgcagacattggcgaaagcttatttgaaagaactcggcacacgggtcatcggggtgaccgggagcaacggaaaaacgacaacgaaagacatgcttcacgccgttctcagcactcagtaccgtgttcacaaaaccgccggcaatttcaacaaccatatcggcctgccgctgaccgtgcttgccatgcctgaagatacagaaatcgccgttttagaaatgggaatgagcgcgagaggcgaaattgattttctgagccgtcttgctgaaccggaagctgccgtcattaccaatatcggcgaatcccacatgcaggatttaggctcaagagaaggaattgcggaggcgaaacttgaaattataaacggacttcgggaagacggcgttctgttttatttcggggatgagccgttgctccgcgaaaaggcgtacacttgccggacaacgacatacggcgcaggcgctgtcaatgatctccgcctgaaagaaataaaacaggcggaagaaggcacgtacttcaatatcgacgggatcgaacgttctttctttattccggttctcggcagacataatgtgatgaatgccatggccgcatacgccgccggcatctatttcggcattacgccggaaaatgccgctctgggactgagccgcctgaaggtgacggggatgagattggaactggttaaaacggaaaacggcatctcgatcgtaaacgacgcgtataatgcgagcccgacgtcaatgaaagcggcggtcgaattaatcgaaacgatgaaaggctatcggaagaaaatgctcgtgctcggtgatatgcttgaactcggtgatgaagaaaaagcattccacgaagaatgcggagctgcgatcaatccggcggaaattgaccatgtatttacttacggcacactcggcgcattcatcgcagacggagcgcgccggcattttgaagaagggcgcgtcagccattatctcgacaaaaaagaactgcttcacgccatacaggatatggccgcttccggcgatctccttctgtttaaagcatcgagaggtatgaagctcgaagaaatcgttaaagatttattagagaagaactgaaaaaatactgatcagcattataaaaatatacaaaaatgaagaaactaattcagggtgaaataattctgtccgtatgaaaaagaaaggccgccggctgggaaatcccgtccggcgcggggtccggcctcgtttgcgggaagaatccggtcaggccgcttccggccgcctgaccatctcgccttattgaaaaacacatagtgtaatggtaagattaaacgtaaagtaattcgggctttgtatacgtatgatcctgtcctttggatgaaagggcagtttttagtggtaaatcacgacattactgaaacagcaatcagaaggagtttgaataatttgactataacgtttcaagatttccaattaagttctgatctcatgaaatcaatcaatcgtatgggatttgaagaagcaacaccgattcaggcacaaacgattccgctcggacttttaaataaagatgtcatcggacaagcgcaaacaggtacaggtaaaacagctgcgttcggtataccccttgttgaaaaaatgaaccccgagtctcctaatattcaagcaatcgtaatcgcgccaacccgtgaattagccattcaagtatctgaagagttatataaaatcggacaagataagcgtgcgaaagtgctgcctatttacggcggtcaggatatcggacgtcagatccgcgcattgaagaaaaacccgcatatcattgtaggtacgccggggcgtcttcttgaccatatcaaccgccgcacgatccgtttaaacaacgtgaacacggttgtcatggacgaggctgatgaaatgctgaacatgggattcattgatgatattgaatccattctctcaaacgtgccgagcgaccaccaaacgctcttattctcagcaacaatgcctgcgccgatcaaacggatcgcagagcgtttcatgactgagccggaacacgtaaaagtaaaagcgaaagaaatgactgtgtccaacattcagcagttctacttggaagtgcaggagcgcaaaaaattcgatacgctgactcgtcttcttgacattcagtctccggaacttgcgattgtattcggccgtacaaaacgccgtgttgacgaattgacggaagcgctgaaccttcgcggatatgcggctgaaggaattcacggcgacttaacgcaggcgaagcgtatggtagcgctccgcaagtttaaagaaggtgcgatcgaagtgcttgtagcgactgacgttgctgcccgcggacttgatatctcaggtgttacccacgtatacaactttgacgtgcctcaagatcctgaaagttacgttcaccgtatcggaagaacgggacgcgcaggaaaaacgggtatggcgatgacgtttatcacaccgcgtgagaaaaacatgcttcgcgcgatcgaacaaacgacaaaacgcaaaatggaccgcatgaaagagccgacgcttgacgaagcattagaaggtcagcagcaggtgacggttgaccgtctgcgcacggcgatcagcgaaaacaacctgaacttctacatgacggcagctgcggaattgttagaagatcatgatgcagtgacagttgtggctgcagccattaaaatggcgacaaaagagccggacagcacgcctgtacgcctcactgatgaagcgccgatggtcagcaaacgctataaaaaccagcgtacttctaagcgcagagacggccaaggcggcggctaccgcggcggcaaagggaaaaacaacaaccgttcttcctacgataaaaaacgctcaagcgaccgccgttcttcaggtgacagacgccagaaaaaatcatactaaaacacaggaagcggaccctttttcggggtccgctttttttcgatatgccggaaagtgaatcttttttgcaaatcagccgtatttgtatgtatgataaaaaatgggaggtaggtatgttgagagcacagccaaaaaatcgaatcagtccaagcggcttaaaagtctggcgtcttcaggaaatcatcctgtccgccttctgtcttctggccgttatagcagcagctgttttaagccatttcttccattggccgtattggatcaccggagtcctcggcatcatttgggtcatcggttcagtgatatccgtctatgccataccgaaaatcaggcacaggatctggcgctatgaggtccatgaaaatgaaattgatattcaatccggcatttttatagtcaaacgggtcattgtgccgatggtgagggtgcagcacgtagatacttcacaaggcccgctcctcagaaggtaccgcctggcctcagtcaaaatctctacggcggcaaccgttcattccattccggcgcttgatatggaggaagctgaccggctgagggattccatttcccgtctggcaagggtgacggaagatgatgtctgaaccgaaacgtctgcacccggcggccgtgattttgaacttattccatattattatcgaaaccattaaaaacattattctgccattttttctcgtctatattgttaattccaaccacttcatccgcttttacggaggcattgcgctcgctgtcctgcttatctggctgattacggcaagtgtgatcgagtggagaaaatttacataccggattgaggacggagaattcagaattgaagaaggcttgttttttacgaaaaagagatacatctccattgaccggattcaatcaatgaatacgagtgccggcatcgttcagcagctttttaagcttgttaagcttcaaatcgaaacggccggcgacgggaaaaacgccgaggccgtcttatccgccattactgtggaagaggcggaacggatcagagcggctgtttttcagcaaaaagcggagcaagaagaacgaggggagaccgcagcggagcaggagccgatgcgcggggaagatgtgcaatccgtttaccgcctgtctgtgggtgagctgcttatggccgcctcaacatccggggggatcggtgtcatcatctcagcggtattcgccctcttttctcagcttgatgaagtacttccgatggactggttctacgacaggttttcttttctcaagcatgcgagcatcggcatatacgccgtgatcatttttataggattgttcatcgcctggctgttaagcatcgccggtatgatgatcaagcatgccaactttaagatagaaaaaaaggaacacgaattggtcattacgagaggaattattgaaaaacatcaagtgaccatcccgctccgtaaaatccaagccattaaaattaaagaaaatgtgatcaggcagttattcggatacgcgacggttgcgattgtcagcgccggcagtgcggggaatgagaaagaaggagctcagacgattctgtttccgatcatccgcaaatcaaagctcggtgtgatgctgaacggtttcacaccggattacgtactggaagaaaataggaatcatttgccgaaaagggcgctgcgccggtatttattccgctccgttatcttctcggttttcgtgatcattccgctttgtattctgtttaaaccgtgggggtatgcatcgctccttgtgcttcccgtcgaactggtgctgggctacgcctcatttaagagcgcgtcatggtgcttaaacggaggccggctgcagctcaccacacggctgatcgggaagacgaccacgattatgctgagaagaagaatgcagatgtttgaagtcagccgctcctttctgcaaaaaagaaggcggctcgcatctgtggctaccgcagtgaaatcagctcaccacatggagcatgtcatgctgaaggatgtcagcgaggaagatgccgaacgcatcgggcgctggtattcatatgaaaaagcggacggttaataccgccgctttttttgctgcacgcataaaaaggaaagcaaaaatccgcctgccagtccgaacaaatgcgccataatgttaatattagaattgataaacgtcgacagtaccgcgatgataagcagggtcataatcattttcgactggtcccggccgatcagctccttgcggaaaacagtcagaaacacatacacgccgaaaagtccgaaaatcgcgccggatgcgccgacatgcacataatcaagcggttcggcaagatatgtgccgatattgccgataatgcccgatgcgatgtacacaatcaaaaaacggacttttccgagcatctgctccagcgggggcgcgaataaaaagagagacatggagttaaacaaaaggtgagtgaaattcgcatgtaaaaacatcggtgtcaccagccgccaccattctcccgaggaaacgccgtaattatagccggtcactgcatctgaccacatcatgacggaatgaagcggcatactgaaaaacagccacaagaacgcctgcagcgccaagatacagctgacggccggataacgtctgataaaagtctggaaattttccgtacgtataaacatcgcaagcccctttgcatctgatttgttacatatatagtaacacgtttatgacataaaccgttttttagtacggacttttaggaggaattcacatgattttcggaatcggaatcgacatcgttgaactgcacagaattgaaaacatgctcagccggcaggcgaggtttccgcaaagaatattgacggaggctgaatacgcccgttttacattgctgtcggacaaaaggaaaattgaatttctcgcgggaagatttgcggcaaaagaagccttttcgaaagcatacggaacgggtatcggcaaagagctcagctttcaggatatcgaaaccggaaacgacacggcgggcaagccggtgctgacctgcgccaagctggacggcgcggcggttcacgtctccattacccatacaaaagaatacgccgcggcacaggtcgtgattgaaaggttgtcacgctagtctgcatattagccgaaaccccttcatatatttgatagtgcattaagggagacaagttgtttgaggcttttatggtacgcgtccgtccgttcagggcgtaccgttaaagtcaaacaagcgatttcttccctttacatcaattgagaagaaggggttgaaaaaaggtgagaaaaagctttgttttgcttttaacgggactgcttgccgtccttattctttcggcctgcggccaaaaatcacaggaagatatcgtgaacggtttagataagaaggcgaaagaatacacctcgtacaaagcgaaagccaaaatgaccattcagacggggagtgatccgcaagtatacaatgtggaaatctggcataaaaaaccttccctgtaccgggtctatctggaaaatccgaaaaaagaccaaaaccaagtcattttacggaacgccaacggagtctttgtccttacgccgtctttaaataagagcttcaggttccaaagcgactggccgaataacagcagccaagtatatttgtttgagtcacttgtaaaggacgtgcagcatgacaaagacgccgtctattccgccaaagataaaaagtacacgtttgaaacaaaaacaaactatcagcacaacaaaatgctgccgactcaggaaatcactttcaacaaaaaggacatgagcccttcgctcgtcaaagtcatggatacagaccggaaagtgatggtaaaagtcgaattcaaaagctttgaattcaacaagccgtttgataaagactcttttgacgagaagaaaaatatgacgctttcccagatggacgtcgccacaagcgccaagccgtctgattcatttgcggtcaaaacaccgcttcaagtgccggccggcgtcaaaaagcttgaagagaaagatatttcaacggcggacggcaaacggatcgtcatgacttacggcggagaaaaatccttcacccttattcaagaaaaagcccatatcgcaaaagccgcctctgccgtcacgctgaaaggcgaaccggttaatctcggcttcacggtggccgcattatctgatacgtctttaacgtggacatatgacggagtggattatcttctgtcatcacaggatctgacaaaggatgaaatggtggccgccgccaaaagcatgcagggacagtcgtcaaaataatgtcaaaaaagaggccgccgctgtcggtctcttttttgattccatttcactttgcagaataattttagtatgataataacaatatgaattgaaaataatgctaggaagtgtatcgaatgaacacagcatccttttacagagaaacgtgggcggaaatcaacctgtccgcgattaaagaaaatgtcacgcatatgaaaaaacacatcgggcaaaacgtccatctcatggcggttgtaaaggcgaacgcttacggccacggagatttggaagttgggaaagccgcgcttgaagcgggtgcctcttgtcttgccgtagccatactggatgaagcgatttcattgagaaaacggggcattacagcgccgattcttgtgcttggcgccgtgccgcccgaatatgtacaagcagctgccgaatatgacgtaacactcacgggatattctgttgaatggcttcaggaagctgcgcgccacctcggaggtgccacattgccgtttcatctgaaagtcgataccggcatgaacagactcggagtcaaaacggaggaagaaatccaaagcgtgttaaaaatcctcagccaaaatcccggtttagtctgtaaaggcgttttcacccactttgctaccgcggatgagaaaaacagagattatttcctcttccagtttgaccgctttaaaacattgatcgctccgctccctttaaaagaattgatggtgcactgcgcgaacagcgccgccggacttcgccttaaaaaaggcttctttaacgcggttcgtttcggcatcagtatgtacgggcttcgtccttctgctgacatccaaagcgaaattccgtttcaattaaagccggcttttgcgctgcactctgtgttatcccatgtgaaaaagatccgcaaaggggaaagcgtcagctacggcgcaacatatacggcagagaaggatcaatggatcggaacggttcccatcggctatgcagacgggtggctccgcaagctgagcggcacgtctgtgctgatcggcggcaaacggatgaacatcgcgggaagaatctgcatggatcaattgatggtcgaattagatcaatcttatccgccgggcaccaaagtcaccctgatcggcagccagaaggaagaaacgatcacgatggatgaaatcgcagggcggcttgagacgattaattacgaggtcccttgtaccattagttcccgcgttccccgtatgtttttggaaaatgagagtataatggaagtaagaaatcctttactgcaagataatacaaacaagtagccgtcatccggaaaaagagaatttataaaacagctttgcttgacgtttgaataatggtatcattatgtctggatggatgaattggtcgtatccgtaagtttggtggaggtgtatgttttttgtctgaatccagcgcaagaaccgaaatgaaaatcagcttgcccgaaaacttagtagctgaattggatggtgtagcgatgcgggagaaacgaagcagaaacgaactgatatcacaagcagtgagagcgtatgtcagcgaacggacaactcgccataaccgtgatttgatgagacgcgggtatatggaaatggcgaaaatcaacttgaatatctcttctgaggctcactatgctgagtgcgaagcagaaacgaccgttgagcgcttagtcagcggaggataatcattttgattgtaaagcgcggcgatgtttattttgctgatttatctcctgttgttggctcagagcaaggcggcgtacgcccggttttagtgatccagaatgatatcggaaatcgctttagcccgactgctattgttgcagccataacagcccaaatacagaaagcgaaattaccaacccacgtcgaaattgatgcaaaacgctacggttttgaaagagattccgttattttgctggagcaaattcggacgattgacaagcaaagattaacggataaaataactcatctggatgatgaaatgatggataaggttgatgaagccctgcaaatcagtttggcactcattgatttttagtcatattttggttgctcatatagagcaactttttttgttttcgaaaaacataagcgctataataaagaaataatcaaacaaaatttgttgttttgtgtcgggaggtcagtgaaacccatgtcgaatcagaaagtgtatcagttcattattgatcagcatgatgaactgcttgatacttggacagccaaactaaaagaagtaggcaatcaggaagactatcagcttacgaatcacatatgtgaaaatatttgtaaagattatatagacattcttttattatcgacaaaaaatgacgaggctgccgaagagcagatcagtgaactcgcactgcgcgccgttcagctcggcctgtcgctgaaacttctttcagccaccctgtcagagttttggaaactgctttacgaaacgatggtcgaccttaatatggccgatcaggacagagcagatttgattttggaaatagacagctttttcaatccgatcaacacggaaatcttaaatcagtattctatctcctgggaaaaaacggttactttgcaaaaaatcgcgcttcaggaattgtcggctccgctgatcccggtatttgagcatgtaacggtcatgccgcttgtcgggacgattgatacggagcgtgcaaagcatattatggaaaatctgttaaacggcgtcgtaaagcaccgttcacaggttgtattaattgatatcacgggcgtgccggtcgttgatacgatggtggcgcaccatattattcaggcatcagaagcggtgcggcttgtcggcgcgaaatgtctgctcgtcggaatccgtccggaaatcgcgcagacgatcgttaatctgggaattgatttgtcgcaggttattacgaagaatacccttcaaaaaggaattcaaacagcgcttgaaatgacaaatcgaaaaatcgtttcattgggggaataacattgtgagacatccaaaaatcccgatcctgaaactgtataactgcttattggtatccatccaatgggagcttgacgaccagacagctttgcattttcaagaagatctgctgaacaaaatctatgaaaccggcgcaaacggggtcgtcattgacctgacatccgttgacatgattgattcatttatcgcgaaagtgctcggcgatgtcatcaccatgtctaaattgatgggcgcaaaggtcgtattgacgggaattcagccggctgtggcggtcacattgattgaactcggaatctcacttgaggaaattgaaacggcgctcgatttagagcaagggcttgagacattgaagcgggaattgggggaatagcgatgaacgaccaatcctgtgtgaaaatcatgacagaatgggatatcgtagccgccagacagcttggccgcaacgttgcgaaggaattaggcttcggcacggtggaccaggccagaatcacgacggctatctcagaattggccagaaacatttacttatatgcaggcaagggccaggtcagcatagaacaagtaaacgacagagggaaaaaaggccttaaaattatagcagaagacaaaggacccggaatccccgacatccgtaaagtgatggaagacggcttttcaacgtcaggcggactgggagcgggacttccgggcgtgaaaaggctgatggacgaattcagcctgcaatctgttgcagaggaaggaacagagattcaagccgtaaaatggcttcggtaggaggttagaacgtggatttcagggaggttatagagcagcggtatcatcagctgcttagccgatatatagccgaattaacagaaacatctttatatcaagcccaaaaattcagccgaaaaacgattgaacatcaggttcctccggaggagatcatcagcatccaccgaaaagtggtaaaggaactgtatccggatctgccggaagatgtttttcattcgctggattttttaatagaagtcatgattggctacgggatggcttatcaggaacaccaaagtctgagagatatccagcaggagcttcgttcagaaattgaaattgccgcaaatgttcagcagacgctgctgggcacaaaaattcctgaagaagaagaactggatatcggggcgatcagcgtccccgccaagcaaatgagcggggactattatcactttgtcaaagacaaggaatcgattaacatcgcgatagccgatgtcatcggaaaaggaatacccgccgcattgtgcatgtcgatgatcaagtatgccatggactctcttccggagatcggcattcacccctcccaagtgctgaaaaatcttaaccgcgttgtagaacagaacgtggactcaagcatgtttatcaccatgttttacgcaaactacaatacgaaaaatcaccaatttacatatgcttctgcggggcatgaaccgggcttctactactctgaaaaagaaaaaaagttttatgatctggaggcaaaaggattggtgctgggaatttcccaggattttgattacagccaatatgaacagcacatggacgaaggagacatgatcgttcttttttctgacggcgtcaccgaatgccgtaccgaaaacggtttcttagaacgcagcgacattcagcgcatgctggaagaacatatggactgctccgcgcaggatatggtcaaaaatatttacgacagcctgctgagacttcaggactttcagcttcatgatgattttacgttaattgttttgaaaagaaaggtttaaaaaaacggcagcacgggtaaaaagccattagcacgagtaaggataactttcagaggtgatacgatgaatttaacggtagatatgaaggagaatctttcagatatacaaatcaatatcgctggagaaatcgatgtatactcagctccggtggttcgtgaaaagctgatgcccctggcaaacgaggggaaggacatgagaatctgcttaaaagatgtaaactatatggacagtacgggtttaggtgtttttgtaggcgtgtttaaaacggtgagcaaggaaggcggctctctgaagcttgagaatctttccgaccggctcgtccgtctgtttgaaattacggggcttaaggacatcatcgacatttcggcaaagtcagaaggtggcgtgcaatgagtacatcagttgattatatagagatgaaaattccggccgaaccggaatatgtaggaatcgtcaggcttacattatcaggagtcgccagcagaatgggctatacctatgatgacattgaagatttaaaaatcgctgtcagcgaagcttgtacaaacgctgtccagcatgcatacaaagatgaaaataagggagaagtatccgtgcggttcggtgtgtttgaggatcggctggaggtcattgtcgccgatcagggagacagctttgattttgatcagaagcagcaggatctcgggccgtacacaccttcgcacacagtcgatcaattgtcagaaggagggctcggtctgtatttaatggaaacgctcatggatgaagtcaaagttcaaagcaactctggcgtaaccgtggcgatgacaaagtatttaaatggggagcgagttgatcatggcacaaccatcaaaaactacgaaactaactaaagatgaagttgatcggctcatacgcgactttcaaacacatgataataaagaagcccaggaaacactcgtcgaggtgtataccaatctcgtcgaaatgctggcaaagaaatattcaaaaggaaaaagctttcacgaagatctccgccaagtcgggatgatcggacttctcggagccattaaacggtatgatcccgaggtcggcaaatcctttgaagcatttgcgattccgaccatcatcggcgagatcaaacgcttcctcagagataaaacatggagcgtacacgtcccgagacggattaaagaactcgggccgcgcattaaaatggcggtggatcagctgacgacagagacgcagcggtcgccgaaagtcgaagaaatcgcagcctttctcgatgtgtcagaagaggaagtgcttgaaacgatggagatgggaaaaagctatcaggcgctttctgtcgatcacagcatcgaagcggatgcggacggaagcaccgtcacaattttagatatcgtcgggtcgcaggaggaaggatacgaacgcgtcaaccagcagatgatgatcaaaagcgtgcttcatgtgctgtccgaccgcgaaaaacagattatcgatctaacatttgtgcaaaataaaagccaaaaagaaacaggggacattctcggaatatctcaaatgcacgtctcgcgcctgcagcggaaagcggtgaaaaaactgagagaggccttgattggagatccctccatggagctaatgtaatgattcaggttgaagaaaatgaacatgttcaaactcttgtataccaattaaataaagaaggcaagtccatatgcggcgacagcttttttatgaaggcgaatgaagaagaattagtttgcgcggtagcggacggtctcggcagcggatctcttgccaatgaatcctcgtcagccattaaagacatcgtggaaacgtatgcggatgaggatgtggaaagcatcattgagcgctgcaatcaagcgatgaaaaacaaaagaggggcgactgcctccatcttaaaaatcaatttcatcaaaagggaattgacatactgctcgatcggcaacgtccgtttcttcctgcactccccatcaggcgaagtttttcatccgctgccgatttcgggttacctctcaggcaaaccgcaaagatacaaaacgtatacgtcatcatacgaaaaaggggcgacattcatcatctacacggatgggcttgaggttccgcatatccgcacctgcttaaagcagggacactcaatagaagaaatatcaaaatcacttcatccgtacacaacatccagacgtgatgatttgacctatattctcgggcagcttttatcgtaaggctgctttttttatgttccgccgttttttgatacactagagaaagaaagaagagatggaggcttttgtgatatggaaacgttagcccttttgaaaaaacaaattgctgaagaaacagcgttatcccaaaaacatgtcgaaagtgtcatccgcctgctggaagacggcaataccgtcccgtttattgcgcggtaccgaaaagagcagaccggctcaatggacgaggtgcagattcaggcaatctccgagcggtggcaatacatacaaaacctgacgcagcggaaagaagaagtcatcagattgatctccgagcaggacaagctgacagacgggctgaagcaaaaaatcgagcaagcggtcaagcttcaggaagtcgaggatttataccgccccttcaaacaaaaacggaaaacaaaagccaccgtcgccaaaagcaaaggccttgaaccgcttgcggactatattctttctctcccgaaagaaaaccgccttcacgacgtcgctgatcaatatatcagtgcagaaaaagaagtcgcttcaagagaggaagccattgaaggcgcgaagcacatcatagccgaacaaatctcggatgatcctcatttcagaaagtggatccgccaggaaacgtataaaaaaggaattctcacttccgcggcaggcaagtcagccgcagatgacgagaaaaacgtctatgagatgtactacgagtacgaagagccgatccaaaaggtcgttcctcacagagtgcttgcgatgaaccgcggtgaaaaagaaggcattttaaagattgcgatcgaaccgcccgccgatcagataaaagcttatttagaaaagcaaatcatcaaacaccgtgaaacacctgtgaaagaaacgctgaaagaagccattgaggacagttataaacgcctgatccagccggctattgaacgcgatatccgcaaagaactgtcagaaaaagcagacgcgcaggcgatccatattttcgctgaaaacctgcgtaagctcctgctgcagccgccgatgaagggaaaagtcgtgctcggcgtcgatccggccttccgcacggggtgcaaactggcagtcgttgatgagacgggaaaagtgctgaaaatcgatgtcatttacccgcacgctcccgtcaaaaagacagcggaagcccgaaaaaaaatcaaagaattgctggatcggtacgaagtcgaggttgtggcgatcggaaacggcacggcatcacgggagacagagcaattcgtcgttgatgtgctgaaagaaacagagcgggacatttattatgtcatcgtcaatgaggccggagcaagcgtgtattccgcgtcagaaatcgcccgtgaggaatttccggattttcaggtcgaagagcgcagcgccgtctccatcgcgcggaggttgcaggatccgctggccgagcttgtgaaaattgatcctaaatccgtcggtgtcgggcaataccagcatgatgtcagccaaaagcatttaaacgaatctctccgttttgtcgtagagaccgtcgtcaaccaagtcggggtgaatgtcaatacagcatcagccgcgctgcttcaatatgtagccgggttatccaaaaccgttgccggcaatatcgtcaaaaaaagggaagagctcggaaaatttacaaaccgcaaagagctgaaagatatcccgcgtctcggcgcaaaaacatatgaacagtgcatcggctttttgagagtgcccggaggacgggagccgctcgaccgcaccgggatacacccggaaagctataaagagacaaaggcgctgctcaaaaaactgcagctcactgcggatcagatcggaagcgcggacgtaaaagagaaaatcagcgcactgccgctgtctgaaacggctgaggagctcggtataggggagattacgcttgcggatatttgcgggcagctgacaaggccggagcgagatccccgtgacgaagtgccgaagcctttgctgaaaaaagacgttctgcagcttgaggatttaaaggaaggaatggaattgcagggcaccgtccggaacgttgtggacttcggcgctttcgtcgatatcggcgtcaagcaggacgggcttgtgcacatctcaaaactgagcaatcaattcgtcaaacatcctctcgacgtcgtatcggtcggagacatcgtcaccgtatgggtcgaaggggtggacgtgcaaaaaggcagagtgtcgctgtctatggtaaaataaaagcactgcttacgagcagtgtttttttctgtagaaataccagcactggttcagcagtttgatttggtaattgtccttttctaaaaacgctttttgcatttgtttcatcagccaattcggcatggctcattcctcctcagcttttagttagaggtcggttttaacacattgtatgcgaacggtgaattgtcccgttcaatgtttttaaagcggggtgcacatatggataacgaacaacttcaaaagctgacggaagacatctctgcacaggatttcggaaagccgttccgtcaccgggcctttttcaatgaccggctgaaaacgacaggcggccggtacatgctgtcttcccataacatcgaattaaaccgaaaatatctgctcgaacacggacggagcgagctggtaggcatcatcaagcacgagctgtgccattatcatcttcatcttgagggaaaagggtacaagcacagagacaaggatttcagagacctgcttcagaaagtcggagcgccaagattctgcacgccgctgcaaaccaaaaagacacaaaagaaaacatatatgtatagatgcgaggcctgcggccaacagtatataaagaagcgggcaatgaacccggaaagatatgcctgcggaaagtgcagaggaaaaatcaaaagaattttttaaaaaggcttgactcatttcaatgatctgtgttaaattataaaagtcgttgagagacaacgatgctttctcaaaaaaaataaatgttgcttattgacacaatatgtcgcatcatttataataaagaaagtctgatcattccacagtagctcagtggtagagctatcggctgttaaccgatcggtcgcaggttcgaatcctgcctgtggagccattatggagaagtactcaagtggctgaagaggcgcccctgctaagggtgtaggtcgcgtaagcggcgcgagggttcaaatccctccttctccgccagataagttctcaaccagacggcccgttggtcaagcggttaagacaccgccctttcacggcggtaacacgggttcgaatcccgtacgggtcaccatttaccttcgttgggctatagccaagcggtaaggcaacggactttgactccgtcatgcgttggttcgaatccagctagcccagccattttatttaaaaattttgaatcacttttagagcgagccattagctcagttggtagagcatctgacttttaatcagagggtcgaaggttcgagtccttcatggctcaccacttgtcacgcgggtgtggcggaattggcagacgcgctagacttaggatctagtgtcttacgacgtgggggttcgagtcccttcacccgcactttcttttcaaagtgctgatcatcatcactagcttatatgcttagtggaaagacagcttcatagcacgcggtcgtggcggaatggcagacgcgctaggttgagggcctagtgggtgaataacccgtggaggttcaagtcctctcggccgcatcccaataataccaagggtttaaccgcctttggtattttttgtgcttatttttaaatgatctactatccacaaactgcccacttacctggagtaagtcatctacagttgacgtcgcacaaatattttcatcattataggtagttactaatgcctcaaactccaatttgcaaaaggcagagaaagtattgctaagcatggaggaaaacaaagaggccttgttatattatcagctattagaatttagacacgagataatagggtaggggcataaaggtactgaaaaggcttaatcttttttaaaaggttaagtctttttttggctataaatgtaatcggtgcccaattatttgccctgaattcacgaaaaaggataaaataggtgtaaataaagttgatattttaaaattaattcaattcattatcgtaaaagcaataataactaatcggcgaagaaaggataatcagtcaaatgaaaacattagttatcgttatacaccctaatttggaaacgtctgttgtcaacaaaacctggatgaatcgtttaaagcaagagaatgacattacggttcatgacctgtacggtgaatatcctaattttatcattgatgtagaaaaagagcagcagctcctgttagatcatgagcgcatcgtttttcagttcccaatgtattggtacagcagtcccgcgttactcaaacaatgggaagatgatgtgttaacacatggttgggcttatggaactggaggtactaaattgcatggcaaagaactactcttagctatctccttaggcgcacaggaatctgattatcaagcaggcggagaatataatatcacgatcagcgagcttatcagaccgtttcaaatcactgctaactatataggaatgcgttttcttcctgcctttgcacaatatggtacacttcacctttcaaaagaagatgttaagaacagtgcggagaaattggttgactatcttaaagctgagcattgatccggtattcgcgagggaagctgaaataaactaattacagcagggcgatgagtagatatttcttgttgaaatgtagatttccttggtctctaataggtgcccagtttgtgctcggaattcatgaaaaatgatgaaaataagtataaataaaataaacagatgctttgaataaaagcttttgaaactcatgataggtttttactaggttgagggcccagcgggtgaataacccgtgaaggttcaagtcctctcgccgcatcccaatgataccaagggtaatagagagatccttggtatttttttgcgcttatttttaaatgatctactgcccacaaactgcccacttacctaaagttcaaagtgatcaaaatactcaaagtatctggacaatactttgcttggttcttatttgtcgatagtcgcagtaacgaaagcactaaacaacacattaaacagattcttttgatatgacggacacatatgacagtttgcgattgtcgaaattcaatgtataacccttgttcaacttaccaagttcagttaaaagtttgttaaaattgtgataaatgtatgaaaggattaaatgttcatgtcgaaacattaggattacagggaaggggaacaactacatgtcgatttaccataaagtaattggagatggatatccgatcgttatgttgcatggttggacacttgaccatcaggtgatgttaaatgcaatggaaccgttattcgagaaacgaagcggttggaagagaatatacatagacttaccaggtatgggacattctaagccacaaccatctattcagaactctgatgatgttttagaagcgatattgcgtcttttggacgagattattcctgatcaacagtttattgtttgcggtaattcatatggagggtacattgccagaggtatcgttcgttcacgtaaggaaacagttcgtggattactgctgatggcaccattaactatacccgaattcgatgaaagggtagtaccgcagaagactgttctaaaaagagacagcgacttgatatcacatttgtcttcagaggaggcgaatgaattttgctctatggggattgtgcaaggtaaaactgaatgggagaggtttcgggatgaaattttacttccatctaaacaaacaaattatgaattcgtaaacaacattcgtcaaaatggatatgggtttaccttcgatatttcatctaaacttgattatcccacgctaattatcacagggcgtcaggacaatgtagtcggataccatgatgcgtggcggctactcgaagattacccaagggcaacttttgcagtacttgatatggctggtcacaacctgcaaatcgaacaaaccgatgtatttaattcattggttcacaactggttaaacagacttgagtcggaaaattttcggttggtataactttccataagtataagtttactgttgcaattaccaattagttaaacaataattaagataagcaatattggggtttcctgaaattttagtaattattagtctttattgtcattggggatcatttaatcattgaacaaaaataaatccattaccttaaaaaatgttactttatttccagctggataaaaaaattttgtcaggtgtcatgcaataaattcaattgtcggtgattgactgtttaaataaaaccattatttcataccctgtgctacttatttctgttgtagtctaaggtaaagaaagttgaaaaggtatacgaaattcgtcatacaaattaaagttttgaatgaaagagcaggattactcctgctctttttctttctaattgggctagattaaacgcagacggttattccttgggaaaaacaaaaaaatttcttctatccattgactagcttggctttagcctggtttctatcaccccgttgggcttgtcaggttttaaaaaggtatgctacgtttatagtgttttgtttcacctgattgtggggtaataaagatagaatcagtaaataattcttaggaacgacctcaatcttataataaacatattggaagacgtaatggaagatctaaaataaaggtttaggctactttgaagaaataaaagttttttttcgattgtgatcatattcacaatagagctgtatgaaggggaatcatttctccaaatcgtctgcagaaaataccaaccacaacccaaggatatctcactaaccgcttaggctggtattatctgttggctgtttctctttttgttgcttcttgtattatttttagcccaatcggcaaaaataagttaaggaaaccagcgaaaacacttaatttcatccttctttcctggtttacaatgttatttggcgctgatatggatattagtctagtcttttaaggtacagttgaaccaatcagccactatgccgttagctctccatcaggtgaaacagaaacccccggacttttagagaagcattacgctatacattctgggactgcatgctcggaccgtttacgcgcttgtataatgtggatttgataattaaggagtcgatattattaaatgaagtttaacaagaaaaaaattaacgttgtagacattcaaaaagcgaagaaaagcgtgtttgctacagggataggaaacgcgatggaatggtttgattttgctttatattcttatttggcagttattattagtaaaaactttttcagtccagttcaaaacgatgaattaaagttaatatttacttttgctacatttgcaattgccttcttacttagaccggtaggcggaattatttttggtaaaatgggtgataaatttggtcggaaaatagtattaacaattactattttaatgatggctttatctactttaataattggtgtgcttcctacctatgatcagattggggtatgggcccctatattattactctttgcccgtattctgcaaggcttttctgtgggtggagagtacgctggggcaatggtatatatcgcagaatcttctccagataataaacgtataaggttaggcagcggtttagaaatcggcacattatctggttatatagtagcttctgttttagttacagtacttttctggactttatctgatgttcaaatgaatagttggggatggagaattcctttcttcttaagtattccaataggattatttggtttatatttgagaagtcatctagatgaatcaccaatctttgaaagtgacatctctgaaaaccaagaacaacaaccaggtttattagaagtcattaaaacatataaaaaagatatctttttatgtatcgtatttgtggcatttttcaatataaccaattacctattattagggtatatgccttcttatttagatgagaaccttggtataagtgataatataagtacaccggttacagcaattgtattgattattatggtaccgttcgctttaacttttggtaaactgggagataaattaggaaataaaaaagttataacaattggattagtattaggaattgtattttcaattatctcttttcaatttcttaatatggggaatataacattcttatttataggacttttaatgttaggtattgtattatctgtatacgaaggtactatgccaggatctttacctacgttgttccatactgacattagatatcgtacattatcctggacattcaacttatcagtttctatttttggcggaacaacacctttagttgcttcttggttaacccatgtgacaagaaacaatttggcgccgggtttctatttattggcagtcagtttaattggcttaatagttgtgttaaccttatttaaagatacttcaggtaaatctttaaaaggttcttacccaacagttgcttctaaagctgagtttcaagaagctgttgaaaatccaaaagattcactgtggtggaaaatggaacaaacagaaaaggaatgaaaaaaacatccatttaattgaccgactactcgaaatacagactcagaataagctgggattatccgagcagcaatgactgcagctcttttatattctggagggcttactgctttgcaaatgcagcgttgctattctcgatcgtcattattttattggttgtgtcctaataataaaacattgacgcaagaacgaagagaaattaaaaggtccgggcaatacagcaaaataagaagcaagaagctttgttatgccagttcttctcccgaaggagagctggctttttattttctgtatggggtccaaagcagaaaacgagaacttgtacgctaactaatcaacaaaggttttttggatatgaagagggtgaactggtgaaaaaacggagtttgttgtggagttagcttttcaattagggacatctcaacaacaaaataataaccagcccgattaaaaagctcatcaaaagttccattattccaatatacgatccactcaattatttgagtggatctgtttgttttttatttatttgcagcagtctctatgtgacgaaacaataaatggattaaaaccctttacgcagccaggttgcggcgagatcaattgctccgcgcgcagcttcagttttagctaaggcgttgagcatcacgaaatcgtgaatgatagcttggaaacgtacggcagtgaccgaaacaccagcttcacgaagtttattggcatatgcttctccctcgtcacgaagtacatcagcttcagctgtgataatcaatgcagatggaagcccttgaagctgctcagcagttgcacgcagaggtgatgctgtaatttcagcacgctcgttcgaattggttgtgtactgatcccaaaaccacatcatcgcgtccttgcgtaaaaagtatcctgcagcaaactggtgataggattccgtatcgaaagaagcgtctgttaccggatagaaaagtaattgttgccggatattcaagtcacctcgtgctttggccattagcgtgacagcagcagccatattgcctccaacactatcacctgcaattgttagactctcgggaatcatgccgttctcacggccattttcagatgcccacttcactactgcatagatttcttcaatggctgtcggatattttgcttctggagataaggtgtaatttggaaagacaatagcagcttgtgctccgactgctagctcacggatgagccgatcatgtgtatgctcattaccaaatacccagccggccccatgaatgtacacgatgacaggaaggtgcgcaggcgcattctgcgggcgcattattcttactgatacctgtccgctcggtcctcctgaaatcataacatcttcaatatcaactggcagtttatcaattggggcagattgaacctcatctacagcttctcgtcctttctcaggtccaaggtcgaatagatagggtgggttcgcggttgcttctgcaaattcttgagctgctttttctaattgtactttctttaacatcaatctcactccttatttgaaggctggtcacctatatgttttaatcaaatttttttattctattacctattgatcttggcatctttcgtcttacattgctgttgtaatgatttgtacatcaatatttccgcgagtagctttagaatatggacatacttgatgagctgcatgtgttaattcttccgcttgctcttgagataccccttgaatttccacctccagaacaactccgattttataaccattatcactttcatcttttaataaacttactttaccggtaacagctgattcgatttttaatcgttgtctctgggctgctaaatgaagagcactgtcataacaagctgaatagcctgccgcaaataattgttctggatttgtagccgcggatacttgatttggttttggcatagctaaatccaaatcaataataagatcattagatgttacatgaccttctcttccgccttttgttgtagcttctgctgtaaaatatactgtcatcatcaaacactcctataaattaaatttaacacaattgaattttaatcaatctaatcagcgttgtcaattaaattttttgaaattaaattgctctcaatttaaattcgcaattaaaattctctaaatgaatgattagactaaaataaagaacagttttccgcagtttaaagttagtgtacataataaccatattgagaaggtggctcaataaatctatgagtcggtctaaacaatatagtggaagtatctatatcggtcataataagaatgcacctcaaacacattttggttataaataaagtttccatgtatataagttatggttaattaaattgtcagtcattcaatttcccttaatgtaattcttatgctattatgtgtagtaatgaatataaatattgtgaggaatttaacatgaagaatgataaattactgttaagtaatcatctatgttttgcgatttatgcagcttcccgtgaaatgataaagttataccatcctctcttaaaagaattaggaattacgtatccacagtacttggttcttcttgttttatgggagaaggaaaaaatatctgttaaaggtttaggcgaagaattatatctggactccggaacattaactccagttttaaaacgacttgaggagcgaggtcttattataagagagcgttcaaaagaggatgaacgaagtgtaattattacgttaacaactgaagggaatgagtttaaagaaaaagtcacaatgatacctaatgcagtatttgataaaaccggttgtaatgaagaagaaattaaaagttataacaaggaaattcgtaatttacttcacatgctgacaactgagcaatagttttatgaatatagatggcgggccaagcgggtgaataacctgcggaggttcaagtcctctcggccgatccctatgataccaagggttttgacacccttggtattttttgtttataaaaattcatctgttactgtccacttacttatagtaggtcgtatgatttgtcagtcaccttcatccttctgctgactgcgtgcggcggtagtaaatatgataatgcaattaatgaagtgatgaagcaggagaagaaagtcagaaaagaaatgcgagcagattcagatgagtacaaaagagataacgccataatttctgtatatgatgacggcaagtatattcagcgttttatcagccagaagaaagttctcgtaggctgactgcttattcttattatgagaagcttggagattcttatgaggaaatggcacatatgccgggtgatggtgatggcgaccgccttggtctttataagaaaacacctgattataaagaggttaaaggcaaggaaacaaaaacaatgtgcttgttcattcctgataggggaacaattgttttaccgttaagttgttgtgtgagagccagtatgttaaaatgctacgtagatttaataataaagtttagattcaaggagatttatttatgaagttggatgaatttaccatcgggcaggtttttcaaactaaatcttttgaattaacaaaagagaatataatgaattttgcagaagtgtatgatccacagtacatgcatttaaatgaagaaaaagcaaaaatgggcaggtttaatggaattattgcttctggaatacaaacgttatctattacttttaagctttggattgaagaagggtgtcatgaagacgatattattgctgggacaggaatgaataatataaaattcctagcacccgtttaccctaatgataaactgaacactattgttaaggttattgataaaaaaccaaataaaagccagacggggatacttactgtattgttatctacctataatcagaaagaggaaaaagtgtttgaaggtgagttatcagtattaattaaacgctaaatgacctttgcggcatatcatcgtcacctttcattttttataggtgtctggatgaaatgagcaatcatcttaattaattgagtggattttgagtctgctctttttttatttgttcaacctatgtcgagaaacaaaggactcacaataacgaaaaaatcatctcgtaaatacgaatttaaaaattgctaccttgaggttttttgcatattcctctgtatcattgcaccggatgaatatctataatgagcgttctatccttcgatgttatgtttcctttttactttttggttttgtcagttcaaagctgtactttaccatgtcatggatttgatgctctgggagtccctcatctaaggtaagcgtattccaatgctccttgttcatatggtatccgggcttgatttcttcaaaaagaccacgcagaaaatcagccctttcaggttcgcatttaaggttgacacataagtgttcgtcgcgagtgaagataagtgcaaatattttcttattccctttgtgccgaattgcagtccaaccatctccaaaagggtggtcttcataagagtttggaaaggttaggcagtaatcttttatttcatcataattcattatcaattcactccatacctcattatttttatatacagaacatattcgttcaaactaagatttgcggtttcttttataccaatccgagatttcctcaagtctttgtttgaacttagcttctgaaccttgagttgttggatagtaatactcacgccctattaaagaatctggcatcgtgtgcattgtcgttaattttttctctttatcatgagcatttttatatcccttaccgtaatctaaatctaaaatcaatatcaattcggggctggattcaatatgatccagtccctttttgttttattgatttttcttatccccagtctgataaaagattttctgtgaatcatttaacaattatcggccgttttttctttttcgataatatcctttaccacatcctcaattgttatatgtccaagagctttttccaaggcagattgggcgatttcaaatattggaccaattgtactttgtatgttccggcctacaggacattgaggattgggattttcatgtatactaaacaattctttatcttgaacaacattaactgctctataaacatcaagtaaggtgatttcagttaaatccttcgctaattcagctcctgcaatacctggccgtacatttactaaacctgcttttttcagcatccccataatttttcttattaaggcgggatttgtatttacacttccagctaaaaattcagaagtgctaattccgtcttcatttatttcaataagagccaatatatgaattcctacagcaaaacggctgctaatagacatgatttcttcaccatcctaattactttacactctttatagtacacttgtaactgaatgtattacaagtttatttcactctaatatgctcaattaacaaggtgataaaagtattgacaaacaaataaggtgtaactaaaattattacatgtaatcaatttggttacatttaaaattttgaatgattaggaggactttaaattgaaaattggaatcattggtgcaaccggaaaagctggaagtcttatcttgaaagaagcggtaagcaggggccatgaggtaactgcaattgtaagagatgctgcaaaacttaaagaggaaaaggtttcaatcattgaaaaaaatataattgatcttacatcggatgatctaaaaaagttagatgtaatagttaatgccttcggagctccattaggagaagaacaggcacatgtagatgctggccgggcattaattagggcattaaaaggaataggtacaagagcagtaattgtaggcggagcagggagtctttatgtagacgaaaataaaactgtcagtgtaatggatacacctgatttcccggagatttttattccaacagctaaagggcaaggtcgtaacttgcaagagctaaaggaaacttctgatataaactggacatttatcagtccttcagcggtatttgacccagacgggaaaagaactgggttttatcagtcaggaaaagatcatcttcttgtgaactcgaaaggcgaaagttatatcagctatgcagactatgcaattgcagtattggatgaaatagaaaatccaaaacatataaatgaacgctttacagttgtgggagaagctgaataagttactgagtagaaacaaagggcgccattagcgtcatcgctaatggtatcttcctcctaagaatgtacggagacattgaaaactttgcaatcagagtagctgattatttttatgaaaaaggggatttatcacgttccaatgaatattatcgagctgatgacagagtaggcgcttagtgagttggatcaaaaaataaatagctctgactaaaacctttgcgggttagttagagcttttgtaaacccactcgttttcgtgagtgggctttttaaaaatacacctctcaacatgatatttattatttagtacggtaaggggtccgtcaaaacttctaatttccaaatgaaggttctcgcaaaaaaacctgccgcacgtttaacaaataaaaccctgaatgaaacatgatattaatttgcagttatttccgtttcgtgctatgataaaggagaattatttttgttcgtgtaaaggatagtatgaatatcgacttttcgtcttgatgatactttgggcaaggatagtaatacaatgtgtaatacactaggaggcaacaaaaatggaacaaggtacagttaaatggtttaatgcagaaaaaggttttggatttatcgaacgtgaaaatggagacgatgtattcgtacacttttctgcaatccaaagtgacggattcaaatctttagacgaaggtcaaaaagtaacgtttgacgttgagcaaggtgctcgtggagctcaagctgctaacgttcaaaaaactgcttaatcttcaatcgtttatacaaacaggctctttatatagggcctgtttttttatgttctctgtatcatactgaataaaaaaccctactcaccgttcgagtagggacagatgctacaaggtaagaaaaaggtttaaaacctcaaaggattgtttacagtataacataccggattgacgatatgtggaatatataaatgatttgtttttatgttctcaaggtaacggtatgttattctttgttacaattcgcatatcttttttatgaaataagataaacaactgctattcactgtcgcaagagatgtaagaaattctgaaagataaaggggagagtggttgttttttcttccggaaataatcacttagacctaaaacaatgaaagccctgcctctcttccatcgttacggctccttgtccgtgccagggtgaatcaggattacaaaaatcaagtgactatttcatcgagaattcaagtgttcgttgaagaaaaaaatataacagattagattgaggagtaataaaagcggttaatgtttaaaaagtaagttgaagaagttgaacgtctgatcgtaatactctgaaaaacttatctgtcattaaccttaacagaaactttttatttgtttttcagtgattcctttaatgacttccagttcactaatcaaaaattcatatgcattatccaacatttttttcgcttgaattaagtgctttctctttcttcatacgcattaaatcacgtacaacttcagcgccttcttgtgattaaacaggggatactaatattaactctttaaaatcattctcatgccgtcttgaaaattgacagtatacctgtaagggtataatattgattcacaaacattatctagttaataatgtagtgtgataaagcgcagtatgaaatgatagtggataacatgcaaatatataaatttcaaagaaggagttcaacgcatggaatatgatcaaaagattaaaaatcgcttacgccggatagaaggacagataaaaggtgtattgaccatgatggaacaaggaaaagattgcagagaggttgtgacccaattagctgcttcacgtaatgcgatcgatcgagcaatgggtttgattgtgagcacaaaccttgaacattgtgttcgtgaaagtttagaaaagggagaagacacacaacacttagtaaaagaagcggtcgacttattggtaaagagccgataaaaaaattcatcaacctatcatctttaaggttgacgaatttttatattcattataatatacccctaccggtatttaatatgttgaattgaataataggagatctttcgaaaaaatttttaatttcaatatacccccaggggtaatagtgattggtcaggagaataaacatgacaaaacaaacaaaacgcacaacaattgttttatttagcggggaatatgataaagcaatggcagcctatattattgcaaatggtgctgctgcctacgatcatgaagtgacgatcttccatactttttggggattaaacgctttacgtaaagaagagctgattccagtgaaaaaaggatttcttgaaaaaatgtttggaaagatgatgcctcgcggtgccgataagatgggtttatctaaaatgaactttgcaggtatgggccctaaaatgattaaaaatgtgatgaaaaagcataatgcacttacgttgcctcagttgattgagatggctcaagaacaaggtgtaaagctcgtagcttgtacgatgacaatggatcttcttggtttacaggaaaaagaactattagatgatatcgactatgctggtgtagctgcttatttggcagacgctgaggaaggcaatgtcaacttatttatctaatgtgatccattgcaattgaataagtgaaggggggatataacactatgaatagcggagtaatgttcaatactttggatcgtatttcgacgttttttcccattgcatggtgttaaacaaataacaactgctgatttaaaatcggaggcggaaaacaaagacaaacagtttatagatgtgcgaacttcttatgagttccgtacaaggcatattaaaggattcaaaaatattcctttgtctatcttgcctcgtcaaactcatcaactttcgaaagacaaagacgtctttgtgatctgtcaaagcggaatgagaagtgtaaaggcaagtaaaatattgaagaaacaagggtttaaaaacatcacaaatataaaaggcggtatgaatacatggtattaacatccagggaataactttttgcatatttatatacccccgccctatataagaaaaggaggaaaaaaaccgtgaaagcaaatattgtattagacgctaaaggtttgtcatgcccaatgcctatcgtaaaaacaaagaagaaaataaaagaattaaaagctggtgacctattagaaattcaagcaacagataaaggatcggcggcagatctgcaagcatgggcaaaaagctcaggccatgaatatctaggtactgaaacagagggagaagtccttcgtcactttcttcgaaaaggaggagagcattcatcagaaaatgcatcttcaattcctgagatttcattagaagctttcacacagaaagtggatcgtgatgagtctcttcacattttagatgtacgagagatagaggagtatgaagaagctcatatccccggagcggtgcatatccctcttggcgaagtggaaaagcgctttaacgaattaaacaaaaatgatgaaatttatattatttgccattcaggaagaagaagtgaaatggcagctcacaccatgaaaaaacaaggttttaaaaaggttattaatgttattcccggtatgcgggactggacaggtaaaacagaaaaaggaggtatgtaaacatgaccgtgcaagcacttaccgcaaaagaagtcacacaaaaaatctttcacaaagaacctttatttattttggatgtacgtaatgaaaatgactttagcgattggaagattgaaggacatgattttaaccatttaaatgtaccgtatttcgatcttttagatggcgtagaagatatcttggagaaaattccttctgataaagatgtgctggtcgtttgtgcaaaagaaggttcatctgtcatggtatccgaaatgctttctgaagcaggtcattctgtatcctatcttaagggcggaatgaaagcatggagcgaacatttagagccggtaaaagtcggggatttaaaagatggcggtgagatgtatcagtttgttcgaatcggtaaaggctgcctatcatacatggtcatttccaatggtgaagcggcgattattgatgcgacgcgtatggtagatttctttatggattttgcgaaggagaagagtgcgacgattactcacgtatttgatacacatcttcacgcggaccatatttcaggcggcagagtcattgctgaaaaaacaaaagcagcctactggttaccgcctaaagatgctgaagaagcggtattcgattatcagccgttggaagaaggaaacgacatgaccatcggaaatacaaagattaaaattcaaccgatttattctccggggcacacgattggttccacttctttcattgtcgatgatcagtatcttctttcaggtgatatcttgtttattgattcaattggcagaccagacttagccggtatggcagaagattgggcaggagatttaagaacaacgctttatagccgttacaaagcgttgtcacaggatttaattgtattaccggcacactttatgatcattgacgagctaaataaggatggaagtgttggtaaaaaactaagtacattatttagcgagaaccatggtttgaacattgcggatgaaacagaattcagacacttagtaacagatcatttgcctccgcagccaaatgcataccaagagattcgagaaacaaacatggggaaaatcagcccagatgaagaaaaacagcgtgaaatggagattggtccaaaccgctgtgcaatacggtaactcaagtttctattaaaaagaggagagatgaacatgaaatcagataaagtattagacgcaaaaggtctggcatgcccaatgccaatcgtcagaacaaagaaagcgatgaatgaactggaatcaggtcaaatattagaagtgcatgcaacagataagggagctaaaaatgatcttgcagcttggtctaaatcaggcgggcatgatcttttagagcaaactgatgaaggcgatgtattaaaattctggattaaaaaaagctaatgaatgtgaaagggtatcgaatacaaagatgccctttttctttgaaaggaggaaccaaaatggatattgcttttatcacaactcttttcattatagggtttattggtgcctttatttccggaatgatgggtattggcggatcagttattaattatccaatgctattatacattccttctttagtgggagtgatgtcattaactgcccatgaagtttcagggataggggctattcaagttttctttgcgacacttgggggtgtttgggcttatcgtaaaagtggttttttaaataaagcattaattatgtacatgggaagcagcatccttttagggagtgtattggggagttacttttctcattatatatctgaaaaaggaattaactttatatacggaattctggctatactagcagttattttaatgtttatacctaaaaaaggacaagaacatagcgaagacgaagaagtgatatctaataaatggttggcttcgtccctagcgtttctcattggcggcgtatcaggtattttaggagctggcggcgcctttatcctggttcccattatgttatcgattttaaatatccctgttagaatcacagtcgcttcatctcttgcgattacatttctttcatctattggcgcaacagttggaaaagtaatcacgggccaggttctttttacaccggctctggttcttatgattgccagtttgattgcttctcctattggcgcatctgttgggcaaaaagcaaatacaaaattcctgcaatggattttagcgctattaataagtgcgacagctattaaaatttggttaaagctcctttgatatgagtcagcgggtaaaatgaaagattaaaagattcatcacccgttggtttcttattaattctttttgataatggtgacttgggcaagtcttgactatagtaccgtgaaaaacatttgacttagttgcgtccagtatttttttgcatttaggacagcgttttggaacactataaacctgtacgttttaaaacgaagatggtgattttaacaaacatggcacccaagacatgtcatgtaactttctggtgatgaaaaaaacgactccatttttactccacaatatgaattaatctttgtaaaataacatgatcaatataaacacacactaatatataaaggttttgtaatagaaaacacagtttcactttattgatggcccagcgggtgaataacccattgaggttcaagtcctctcagccgcatcacaatgataccaagggttctgaggtttttggtattttttgtttgcggctgcgccgttacttaaagcaagtcgtctggtttgccagctatcttttttaaagccctttttcaattaatgaaatgataaaataggagaagaaagccagaaaagaaatgagagcagattcagatgagaaacacaagaataactcatcgtgatcgtattcgtacacatttttacagaggaggacaattatgattggaatactggcaggaatggggccaaaatctactgggccatttgtagataaagtcgtagacgagtgccaaaaaatatatggagcaatacatgacacggattttccacatatgatgatttattcctgtccgacacctttctacatgaataaacctctcaatcatacggacatggaaaatgcaattattaagggtgctgtaaagcttgaaaaaacgggtgttgattttattgccatcccatgtaataccgcacatctctattttaatcaaataaaaaaatcgatttcagtccctttactgaacatgattgatgaaaccataaaaaaaatacctaaaggctcaaaaaaagcagctcttttagccaccgttcctacggttcaatccggaatatttcaagaagcgttaaacagagaaggttatgattttttacatcaagatagttggcaaatctatgtcgatcaaataatagaaaaaattaaacaaggtcaaatcgatgaggctggtacattatatgatgaattacaccatgacttagcagaaaaggctgatacggttatcattgcatgtacggatttaaatatggtcacggaccaaaaaagaagcggacttactattgttgattcatcagcctgtctcgctcaagccattgtaaataagtatgtatcattaacaaaataagtcatctgatttatcagcaaattcagggcgctttttttcctttaaagcgcccggcttcggcagatgcatgatcctcaattacttctttgaatgtaacttccccgtgttattgttcttttaacattgaatactttcgatacgttttatagaaactgcagccaaatagaacagccataagggcgggaagcgacctcaacagggcaaatggagtttcaaataaaaatgctttccaaaacattgcgctttccatactccacagaccttcagttaaatataaacccgaatccttgtaaatcaaataagaataaaacaagcacagtaaaccaaaacaagatgaaaaccccattagtcttttataataattactctttgattggcgatccgaaaagatttcattttgatcatcattttctttttgccaataccgagttccgctaagccatgggctgtttatataaacccagccgaagtcttcatagatttctttgtactctttaaattttttctttgataaacaatcttgataatccagtctcatcacatattttttgtcggttttttcgaaagtgtatattcctaatccgctgatatttgtacagcgatagcctttttgtagttgctcgttcagccattgctcctctttttcaatatcaaaaaacatcttaaatttcttcattcgattcacttccttcgtgcagggataaaatatgcagtaacctgttttgttccatcttcaaaatggcgcttccttccgcagttatcatataaacctttctccggcctgattctccaacaggctcaatccagccatgcttattcaaattttcaatcgcgccgtataatgtgccggctgctaaaataacagttccgttactcatcttttctatcttctgcatggcggcatagccatgaagcggctcacgcagagctaataaaatataatgcatggtttcagacagcggtaataatttatgtttcatatcctcatcctctattcagttcgactatatagttaaacttaatacagtacaactgaatagtcaatggccttttcaaaatttgtaaaaggaacttgaaaatcaaatctaaaagtcgctttctttacgtaatgggaagcgacttctggggcagttctattcaataaatggcccgattgaacgcattaaaaataccaagggtttgagtcccttggtattttttgttcattgtatgatgatgtaaacttcttgcttatttagcgctgtcgttccagtttttctctataaatgtattcgcaggctgtaagttggttttgtttgcaatttcaatgacagcgggaaccacggaagggtctgttttggagaagttaggaatccgcggatctaaccggaaaaagcgatctcccagcagattcgcgctgaccatggattcatagtagccatttccgccggagatcatctgaagaaatggcagtaaaggttcattaggcgacctgtccaaaaggactccccaatttggaggaaggttcttcagattttcgggacgtatgttatccgcacttaccattccccatcccctcgtatctcttcttaaccgagtcggggcttcacctgtaccgatggatagcgccgcaatttgatccaatggcacgttggctttaccaaccgcaaacgcgatactggccgtactggggttcgttgccactacatatccgtccacgtagttttgataggcgcgctgtgtcgcgggagcaccgctgctccgcagtatgacatcactcactttctcatttaaatagggagagccgggaaagttgtgaaataatacgggcgtccaacgatccagtgccggggagtataatttgaatgaagggacaacaattcgttttcttacatctttaagacgaaggcctggcgggaaaaagtttcgtaccgctttaataaaaccggaatagggtaattgctgattaaaaacaggtccgcccggccgggaagtgctgaatgcgggcaggatttcatcctcaaaatactgaagtgtttccttcggagatcttccgcttgctaatgccagggcagtaaatgaaccgattgaatttcccgcaaatacatgggttcggcttattaatgccggattttcttcagccagtctgttcaatagttgtaaacttaaagcacctaaggtaccgcccccgtcaaaggtcatgatccgatattttgccaaagctgatttctcctttctgatgaaaactatcattcagtatatgttcagccagagtctattgtatggatgaatgaatatctccttatcttaaaaatagtttgattatcaatccggcgagtcgggaaaggatatgttttttatttgaagaggttttttccgggaagaaggagaattattatttaaaaataaaagggggaaaatacttgaatacaattgaccttattgttttacattttgaagaggtaagacggcgaagcatcaagttatggacagctgtacctgaggaaaaaatggactggcgcccggactccgaagccatgtcgtgcaaggaaatgataagacatgtattagaagcggaatttctttatcatcaaattttaatgaaaaatatgagtgagttttcagaggaaactattaatccttatgaatcaaaaacgtttaccacagtaagcgaagaattagaatttgcaaaaccgtatcgggccgcgtttttgacattcatcaaatcgttaaacgaaacagatttaacaaatataaagattgacaggtctgatgttggatatattcgcgaactgggagacatgttattaagaatcgcttaccatgagtctgtacataccggtcagcttttagactacctcagaactgctgaggttgacaggcctttaatttgggactagttaaatgattgagttttacacgggaaggggaaagaatggaatataaaccgattaatttccaagagaaattatctgcattccaagatcaatggtctccaaaagtaatcgctgaaatgaatgattatcaattttaaacttgttaaagtacaaggggattttgtttggcataagcatgacgaaacagatgaagtctttattgttattaagggtaatttaatcattgaatttcgtgatggaaaagtaaaattaaatgaaggtgaaatgtttgtcattccgaaaaatgttgaacataaaccttatgcagaatcagagtgtaacattttgcttgcagaacctaaaggtgttgtcaataccgggcaggaaataactgatcaaacagctgaaaatgatgtctgggtctagcctgtaacaaaaaaacgatcaaaactccgaaagatcgaatgacgattagagaaaatgatcaggaaaaccacttaagaataatttaaggttaaatattgaaaaaatttgttaatattataatatattgtttggaaatgtaatcttttataaggagttttctaattgcgttggagtaaatggttcaatattttttgcatagcagcattgggatcaatatatggctataaattgtttactaatcaagaagtcagtacggctcgtgtaatcatagctgctgctattatcttgtggaacattgtcggactttttagcaaagaaccagtaaaacaaacacagcaagcaaactaaaagctaaaaaatactttccaatcgttcaataaaaagttggtacagaaggatgctgcagcgtgcagcatcctttttatcatttttacaaaaaaaccaagggtttaaccccttggttttttcgtagtctccctttttacgctgcttaagataatcgtcaaaatcattcaagtttcatgcaggcatccagattctgttgcaatgataaatgaaaattgccctaaaaatgtgccggttcatcaaaataccagtccaagctgcagatctttctttacatagtatgtagagattaaaaaatgagagaaggagtggcgtaatgtattataacgatggtgacgatcaacagtacttccagaagaaaaagccatacaacgaggcctgtgaccttggccatgattttgatatggcggacgacgatgcaagagcggaagcggcaagagaagcagaagcgagagccagagcggaagaagccatagcaagagcggaagaagcaagagccagagcggcagaagcagcaaaagcagcagctgaagcaaaggtagaagcggcaaaattagcagccaaagcaaaagcgaaatgtaaaaaacgtcataagaaagagaaaaaacatgattgcaaacgtaagcacaagaagaaaaaataagagcttttcatcatgtaaaagataagattcaatgtgtattgattttatccgtacaggggtgcaaaaacgataaagaaaaagattcttgtcgggggatcaaacagaaagattgctcagcagaaccacgcatggcagggcaaacataatgttctatggacttccatagtttggtcgggatatcacgccaataaatgtaagtgcctatcatggcaggagagacaagagtttcggcaggttgccgcacttgtcttttttttgttttttctcatcttcgcgtatatgtatctatttttaagtttgcagaacatctgtctaagaatttgtccaattcctacatatactggtatgggaatcaaatgcttattgggagtgaaatagatgggatcagcacagttaacgggacgtgtcatcttcaaaggggaccccggctatacagaggcggttaagaattggaacccttatgttgatgtctgtccgcttgtctttgtttttgcgcaaaattcatacgatgtaagtaatgctattaaatgggctcgtgagaagaatgtgcctttgcgtgtcagaagcggccgccatgctctggataaaaatctttccacggtaagtgatgggattgttattgatgtgagtgacatgaataacgttttcttagatgaaaaaaacgcggtggcaaccgttcaaaccggcattcacgtcggcccgcttgtaaaaggtttagctcgggaaggttttatggccccgttcggagacagtccaaccgtcggaatcggaggaatcacgatgggaggcggatttggagtgctttcacgatcgatcggcctgataagtgataaccttctcgcactgaaaatggtagatgccaaaggcaggatcattcaagcaaatcattcccgcaatgaagatttactgtgggcttccagaggcggcggaggaggcaatttcggatataacacccaatatacgttcaaagttcaccgtgcccctaaaaccgcaaccgtctttaatattatttggccgtgggaacagttagaaacggtattcaaagcatggcaaaaatgggcaccgtttacagacgaacgattaggatgctaccttgagatttacagcaaagtaaatggtttgtgccatgcggaaggattgttcctcgggtcaaaaccggagctgattcaattattaaaacctttattaaatgccggaacgccggcacaaacagtaatcaaaacactatactatccggattgtatagatttcttagatcctgatgaaccgattcccggcaggtctgatcagagtgttaaattctcctcggcgtgggcgctcaatctttggccggaagaacctattgcagtaatgagacaatttttagaaaaagcgactgggacagaaaccaatttcttttttatcaattggggcggtgcgataagcagagttccaagcagtgaaacagccttctattggcgccgtccgttattttatacggaatggacggccagttggaaaaataaatcacaagaagcttcgaatcttgcatcagttgaaagagtgcgtcagctgatgaaaccatatgtaacaggttcttatgtgaatgttccggatcaaaatatcgagaacttcggaaaagcatattacggctcaaactttgcaaggcttcaaagaataaaggcgaaatacgatcccgaaaatgtattccgttttccgcaaagcatcccgccatcgtataaatagtttgatcgttgtgggaaacaaaataaaaaacacaccagaacattcaggtgtgtttttattgttgctataaaagttggttattcacttatattcccagtgcggattccaaacaatttcccacaagtgcccgtcggaatcttggaagtgaccggcgtatccgccccaaaaagtatcatgagcgggagcagttatcgtaacgtttgattcatgtgcgatgtctttgcggtcccagagggcaagtttcagtcccgtttgcaagtcgtccaaatctgtaccggctgttccttctgtattctgtaggcagacccaagccatcccgatagaagtgcagcgatttttctaaattatctgcgcctaaagtaattactgtaatccgcggcttcatagcaatgcaacctcccaagctaagctaatgataagaaacattttcattgaaaatattttgacatttcagtaaagaacctatatattcatatatgagcacataatcatataaggttatttttgtgtccgtgttagaatgcttcatagcagaaaagaaataataaatacagtgtattagataaggaggagatttttatgggtcacaatcacaatcacgctggcggatccaataagaaggttttattgatctcttttatcatgattacaggttatatgataatagaagcgataggcggatttttaaccaatagtttagcgcttttgtcagatgcaggccatatgctgagtgattcaatctcattaatggttgctctgattgcttttaaattggccgaaaaaaaggcaagtcatcataagacattcggctacaaacgatttgaaattcttgcagctgtgatcaacggtgttgcattaatactgatttccctttatatcatttatgaagcaatcaaacgtttctctcatccgccggagatagcaacaaccggcatgctgacgataagtatcatcgggttagctgtgaatatattggtcgcttggattatgctgaacggcggagatacaaagaataacctgaacattagaggagcttacttacatgtgataagtgacatgctcggatctgtaggtgccatactggctgcgatccttatcatcttcttcgggtggagctgggcagatccagtggccagtgtcattgtggctattcttgtgctgagaagcggttaccatgtgacgaaagactccattcacgtattaatggaaggaactccggaaaatatcgatgtcactgacatcattcatacaattgaagagacagaaggaattcaaagcattcatgatttgcacatatggtctatcacaagcggattgaatgctctttcctgccacgctgttgttaacgatcagctgaccatttctgaaagtgaaagtattttacgcaaaattgaacatgaacttggagatcaaggcattacacatgtaaccattcaaatggaaacggcagcgcataatcacgacaatacgattctttgtcaggcccaaactgagaatccgcgtgaccatcatcatcattaaaggaggagatagggactaactttgtctgctgacaattaagataaaaccggagggggattcatatgtacgacacgatagtaatcggagccggtcaggcaggaatctcagtaggatattatctaaggaagtcgaaacaaaagtttatcattttagataaaagtcatgaagtgggggaaagctggaaaaaccggtatgactcattggtcttatttacttctcgaatgtacagctctttgccgggaatgcagcttgaaggagacaagcatggactcccttcaaaaaatgaaattgctgcttatctgaaaaaatatgttgaaagatttgaaatcccgatccaattacggacagaagtaataagtgtccaaaaattaaacaactatttcttaattaaaacaaaccgggaagaatatcaaacgaagaatctggtggtggccgcaggtccttttcatacccctaacattccatcaatatcaaaggatgtagccggtcatattcgtcaattacattcttcacaatataaacattcaaaacaactggcgcctgggaatgtactggtagtcggcggcgggaatagcggggctcagatagctgttgagttatccaaagaaagagttacatatttggcttgcagtaaaaaaccggtttatttccctttatggattggaaaaagaagcatcttttggtggtttgataaattaggagttttacatgcaagtcatacatcaatattaggcaagttcattcaaaagaaaggcgacctcatatttgggtatgaattaaaacatgcaataagacagaagaagatcatcttaaaacaaagagtcatagccggaaagcaaaatgaagtcatttttaaagattcatcttcattagaagtaaacaatgttatttgggcaactggttttaagaatccgctttggtggatgaaaatagaaggtgttttggataaggaaggccgaattatacatcaccggggtgtttcagctgcggagggattgtactttattggtttgccttggcagcataggcgaggttcagcgctgcttcaaggtgtaggaaatgatgctgaatacattgtaaaacaaatgaacggcggatagactgaggagagcagtaacttacgtgtttactgctcttttttgtgttgaatacgtccatcagtgcaactattttagtccgcgcatattcagtttgaactaaatggattcacatggagcgcgtgcttcactcctcgttcagactctctaatttaattctttcaagtaaaagtcgaaatagctcaaataacaagaagttaaaaaactgcaaaccccgccgtatacgtatccgcccactatagagttcattaattacttgggaccatagaagaattgtcaatgccacttccgatagttgtaaccagccaaaaaaagaaaatggggagggtgtgcttaatttgcacaatcttttatgtagaagtggcccaaggagccatcctgcattttgcattcgaatgaacctgtcgtaaaaaattgagagcagacttaaatatctgctcaactcgctgttatttctcaatgttgaatcggtctttgatcttttcaggcagtttctcggccttaatagcttcagattctccggtataaccctcatagctcctcggaacgcgtacaatgtcaccttcttgataaggcttttcaacaaagaaagaaaccatctttttcttacctttctcgttatacccttctaaattgtaaacgtagttgctattatttttgtttttttccgcttttccgtgaatttgtacgtaataatcgctttccagcacggcgccttgatcagcgcagcctcctaatatgaaaaccgataggcagcctaatataataatgaaaatgctcatgtttttcattcttcatcactccttttatatttcttattctaatgaacactgcatatcgaataaatgcgaataccttacacttaccttacttttttgtaagaattcctgatataaaagataatgattcagttgcagaataacaaataatgggtaaatgcaatctcgtttggaaggagactgatatgatcattaaaatgactccattttttaatatgaaagaattcaataaaccaaacaaccatttgctgtttcaaggagaattgcacctgcatttgaaagcaatgtgtggaatataccgaggaacgatttgctgaaccttatgttaagaaaaatgaagatgatgatgtcagttacgttgaagaagaggggaaagcggtctttttttattacaactgcgccggccggattaagatacgttgcaaatgtaatagcgatttttgtctgaccattttaattgattggcagtcagtgaaaatagacatttgtaatgaatttatcgttgctcctcctaataagcggctttaactgccaagtttctgtttctcttcataccatttgcgaagctgatgaatatgagcttgatgatatctattatggtctgccatatgccatattccccattgaatggttgatgatttggtcctttataatcaatctcctgctgtgacatgtctgacacaatggatattaagcggctgtcattttcattaacggcagaatacagcgttcccacaagatgatccatgtgcgtttcaccttttaaatctaaaatcattaaccccacctcattagcacaatttttatatcagtttgccttattactcatatttgtcaagccatccggggaatgggccgctgtaagacgaagctatgaagcaggctctctttgcctgctttttttgtgtgtcggctttacatctgacatgttgcgttatctgaaactgtacctttttaaatgtcagacagtgttatatgatactctgcagatattcaagaatatgtacttggaggacattctcatgcgaaattttaatgttgctatccctacgccttttcatgaagatgaaagtttatatttagaaggatttgatgctattgtcgaacatttgaaaaacagcggtatccattcgttactcatatgcggcacgactggtgaacagcattcactcagcatagatgagcgtcttcagatcattgagtatgttaatcagcgaaaatttgaagatgttgaactgatgttcggtgtttcagccgtaagaaccagtgatgccgtcaaactgatgaaacacatcgagaaaaccaatattgattctgtactgattggttttcctccttatataagaccgacacagcagcaagccgtttattacgttgacgaacttctcagtcatacctctaaagaggctgtgctttataataaccccggccggaccggttttaatctgagtgagaaagcgcttaaagacttaataagccggcatcccgggataagggggctgaaagaaggaggagacgttctgcgtcataaacaaacagagttccctgatcactttattttgtttgcggcaggagacgttgaatttccgaagatgctgagtaacgggtgtaacggcctgtcaagcatggccggaaatgtctatcctgaagaaatcagagaaagcttcagcagcttatcagaaaataaaccgattaatctggatcgaataaacgatctgattgctgaagtgacaaatcatcatactgtcatgaatataaaaaatcactataagaagattgggattcaagcaggcagctgccggtcacccattatataagaaatgttccgtcgcggataagtgaaacatgtgatcagcgcgctttctgtacttggattaggcttaataagcaagttttataatactgtcattagcgggggcgtaagcatttgtttaactttacataagggaacccttatgatatggtgattattgttaatattgacaagaaagaggtgaaagcgatgataacgatttatggaattttgtatggtgaaaatgcaaaaattggaaacatcttggcggataaagggagcagtctgtccttttttaagccaaatcatcatacaaaaacagttatcggtgctttttctctatgtcaaataaacgataatccaatgacataatgtccttgtttatttgtgcatgatgttatttaagcgtaacaccgataattgtgtcggtgtttttttgtgcctgattttaaaaaaaggttagatgatcactcccttctatttactcaaacaaaccagagttttatggaaggatgagaaaacatgcaacaaaaaaacaagtatataagaattcaagagttcctgaaacaaaataagtttcctgattttagaatgaatcaaatcaaaaatgctgtgttcaaagggagaataaatcattttaatgaaataacggttcttcctaaatccttgagaaaattgttaatgaatgagtttggagagtcaattttaaatattgctgctttaaaagtgcagcattctgagcaagtaacaaaagtcttatttgaaatttcaggagacgaaaaaatagaaacggtcaatatgaaatataaagctggctgggagtcattttgtatatcctcgcagtgcggctgtcattttggctgtgcattttgtgcaacaggagatattggtttaaaacgcagcttaacatcagatgaaatgactgaccaaattttgtactttcacttaaaaggacattcaattgatagtatttcttttatgggaatgggagaagcattagcgaatgtacaagtttttgatgctttacatgtgcttacaaatccggagttgtttgctttaagccctcgtcggttatctatttcgaccataggtattattccgggcattaaaaaaatcactcaggattatccgcaggtcaacctgacgttttcattacattctccttttaatgaacagcgaagcaagttaatgccgataaatgaacgcttcccgttattggaggtaatggacacattagatgagcatatacgtgtgacctcaagaaaagtttatattgcttatattatgctgccgggagttaatgattctattgatcatgcgaatgaagtagtacgtcttttaagaagcagatataagagagggaacttgttccatgtaaacatcattagatataacccgactgttagttcacctatgagatttgaagaagtaaatgagaaacaagttgtaaacttctataaaaaattaaagtcagcaggaattaacgtgaccgtcagaagtcaatttggcattgatatagatgctgcttgcggacaattatatggaaattatcaaaaaaataagaaccgataaatcaggtgcagaactcggtttgacttcatattatttcatttgataacataaaatggttattgtgattgaaaaaaagatacccgtttttataaaaaaggagtcataacgttgctgaaaaggttttttcttgtttttcttacgctgatgatgtctatatttgctgtattcgcggcggctgaagagtctcccggcaatcgtgtcatttcttttgacgagcctatgattttattgatctcactcggaatcattttatgtttgttcattccgccattcgtcatgtccttttttagcagcttggttgtgagaatcatatccggagtctatcaatgttttatcgttctcacgtttgcgggcctcattccgattggatttctgattcccaatggctttttgacaattcttgctgccgttctggggactttggtcagttcagcgagtgttgcggtcaccttattcgttggcaggacagagaacacaaataagctttcgtaagcggttttgacaacaataacacgtcctgaaaacaccaagtgtcacagacccttggtgttttttaattccggcagaaaagaaggtataatgggcggggaagaggtgtcagccaatgaaaataaccagagagacattagaaaaacagcaaatttggatatatggtgtgactcttgtgatcggaggaatagcggggatcgccgggaaagattcaggacttcgctggggatggacgatatcactgtttatcgctgttctcatgtatgccatgtttgcccaaatcccattcttgaagctgagggaagccatgtcaaacctcaagtttatggcggccttactgatcggtaatttcttagctgtacctgtcgttgtatgggtgttaaccgccatttttcctcaatctcctcctatattatcaggggtttgtttggtattgcttacaccttgtattgattacgtcatcgtctttactcagctcggcaaaggaaatgagagattaatactggcttccacgccggttttgttcgccgttcagatggtattgcttccgttatacctgtggctgtttatcgggaaagaagtgataggagctgttcatgcgggaccgtttctggaagcattcttattgttaatagcggtgccgctgctggcggcggtgatgactcaattatgggctgataagaaaccggcgggagaaaaggtgttggaatggacggcgtggctgcctgttccttttatggctctggttttattggcggtcgtcgccacacaaatcggcaaagtcatcaatgatgctgacatcattatacgtgtgattccgatctatctgctattcctgctcattatgccgtttgtctcccgttttatcgcatatgcgttccgtctggatacaggtgaaggaagagcattgatcttcagcacgggcacaaggaattctctcgcagtccttccgttagcgctggctttgccggatgcttgggcctcattagccgctgctgttatcgtcacacagacgattgttgagctgatcggtgaattggtttatatcaaagcggtgcccggatggctgctgaaataaaaaataatctgggctgaaaaaaacataccaatagatattggtatgttttttatgagaattataaagttgcaatatcaataacgaaacggtagcggacatcgctttggagaacccgttcgtacgcttcgtcgacttgatcggccggtatcacttcaattttaggagcaatgccgtgctcggcggcgaaatcaagcatctcctgagtctgcggaataccgccgacgagtgaacccgcaatgctgcggcggcccgtgattaaggagaacacactgtatgagtccggcttagcgggcgctcccacatttaccaatgtaccgtcaatgcgaagcagggataagtaggcatctacgtcaaggttcgcggatactgtatttaaaataagatcaaatcgtccggccagctcagtaaatgtatccggatcgcttgtcgcaaagtaatgatcggctccaaattcaagcgcttcgtcttttttgttcattgagcggctgaggacggtgacctctgcgcctaaagcgtgcgcgaattgaacggctaaatgtccgagcccgcccattccgacaatcgccacttttttgccgggaccggcattccagtgtttcagcggagaataggtggtaatgcccgcgcacaatagcggactggcagcatccaaatccagctgatcgggaatacggacaacgaatctgtcagtgacaactattttctggctgtagcctccgtacgtagggtttccgtcgtagtccaggttattataggtctgaacaacgccttttgtgcaatattgttcgtctccgttcaggcagtattcacattccccgcaggagtctacaaaacagccgacacccacacggtcgccggcggcaaatgtggtgacttcttcacccacggcttccacaactccggcaatttcgtgcccgggaaccatcggaaagattccgccgccccattcatcgaatgcgctgtggatgtctgagtgacaaatcccgctgtacttaatatcaatcaggatatcgtgcggccgtaatgctcttctctcaatcgtcgtccgctcaaatttagctttggcatgcggagcgcttaatacacgagtcggatgattattgcacatggttatcttcctttccaagataaagtgatgaatcctctgttcggttttactttaaatgttaaagcggactttaagtcaaggggtttggtttatttttttatgaaatgatattctataatggcacgcttatgaaaggtatgaaggatgggtggtaagaatatgaagattgcgcaggctgcaaagcaggttgagttatcagccgcgacgcttaggtattatgaaagtataggactgattcctccggtaaaacgcgatgaaagcggcatccgcgattatgacgaagatgatgtgaattggattcaatttataaaatgcatgagaagtgccgggctgtcgattgaggcgctgattgaatataccgctttatttattgaaggagccgatcatacgatcgaaccccgaaaaaacatccttataaatgaaaggaaaaggctgacggagaaacagagggaaattgatgaaaccataaaacgattaaacaggaagattgaggattacgaagatatcctggaaaatgaagcgaaacttaaaaacagattgaaagctgaatgtatttctgaatgaagagaaggtgtcccgggcgccgggccgcatgaaatgtaccaagggaaacgagccttggttttttttattttctaaagagaggaaacaaaacagctttttctatcttatcaatcattacttatccttttttcagcttgacttttttactgcagacttttaaagtgtgaaatgttgcttagactgtgattagcgactttaatgctgaaaagaggtggtttacccagatgaacaatcataagaatccttgggcgttattgcctttagtcttattcgtagggctttttgtcggctctggtctggtgaccggagatttttataaattgccgatcttgattgccgcgatcattgcgtcagcttttgcgctgttatttaaccggaagaaatcgctcaatcaaaaaatagaatggttcgcttccggtgcgggacatcctgatattatcattatggttatgatttttatattggcaggtgcctttgcttcagcggctgaggcgatgggagcggtgcattcaactgtcaatcttgctttgagcattattccgcagcagtttttgctgccggggctgtttatcattgcttgtttcatttctatatcgatgggaacatcaatgggcacgattgcggcggttgcgccgatcagcgccggtttgagcggagagcttggcatctccagcgcgataccgattgcggctgtggtcggcggagctatgttcggagataatctttcttttatttcagatacgaccattgcggcagtccggacgcaaaaaacacaaatgagggataaattcaaaacgaactttctgattgttttgcccgctgccattgtgactgttattatcttattttttattccggcaggccacgccctccatacggatgctgcatcttacagctggattaaggtgcttccttatgtcgccgtgttagtttttgcgttaatcggtattaatgtgatggctgtcatattcggcggattggttttgacgggaatcatcggattggcgggcgggagcctgacgtttgattcttattttaaagcgattacggatggagttgccggaatgagcgaccttatcatcctgtccatgctgatcggcggaatggtcggtgtgatgaaacaaaacggcgggatcgactttttactggagttcatcacgaaacgaatccgttccaaaaaaggcgccgaagccggcattgccggattggtcagcgtgacgaatctggctgcggccaataatacgatctcgattatcgcagccgggccgattgcaaagaatattgctgataaattcaacatcgacaacagaaaatcggcaagtattctggatatcttttcgtgtatgatacaaggattgattccttacggcgcgcagctgttatcagccgggaaattcgggaatatttcacccgtcagcatcctgccatactctttctatcccgttttaatcggaatctgcggcatcgccgccattatatttggactgccgaaattcccaagaaatacgaaataaaagataaaaaaaggcgccgttcggcgccttttttctttcatgacagccaagcatttctcaaaagctgtacgccttgtgtgatctgatccgtatcgagatgggcgaaacctaactttatgatcggcggttcgggctttccggcaacgaaatagacagcggtagggtatactttcactccgtactgaaaggcgcgttcgattaatgtttcttctgtatagttcaggtgaactcttactaatatatacaatcccgactgctcgccgatgatcgtcacctgatcgccgaactgctgcttgatatgtgaagtcaagtgctgcatcttacgcttgtagacagtgcgcatgcgcttaatatggcgggtccattcaccggccttcatcaattcagccatggtcagctggttaagcgaagaagcggtgctttcgaaatgaataaaccgttttttataccggtgcaaaaggcgctgcggcaaaaccatatagcttatgcggatgcccggtagaaaggattttgagaaattccctaaataaatcacccggtctgattgaatggaagcaagagcgggaaacggctgctgtgtataacggaattcactgtcataatcatcttcaagaatataaccctctctatgattcacccaattgatcagtgtttggcgctgctgaatggacatgcttacgccgtaagggctgtgatgggatggggtcacatagattaatttttctttcattgcatgcaattgagaaaaatcagctccgttttcatagacaggcatcgtttccagagatagcccgtgaaattgaaatgccgctctggcaccgtcaaacccagggtcttcaacgataattccggaaaaatcctctttcagaatctggctgagatatatcagcatctgctgggtgctgctgccgatgataaccgaatccgcatctgttttcactccgcgtgattccaagagataagcggcaatttgttcacgcaggtttctctcgccgaacggttcaccgtacagaaagcttttctctgatgccaaaacttgattgtataattttctccatgttttcagaggaaaatgcttttgatcgacggctccggcgcgaaaatcaatcagggccggctgagttgattcggttttctcagcgtaaacaacatcatgttcttgttgaaataaagagggttctatttcattagcaaaatatcctttgcgtgtttctccgcgaatgtatccctccgctaaaagcagatcataggccatcagcgttgtattgcggcttacccgcagggaatccgccagctcgcgaatggaaggcagccgctcatctgcctgaatatttccttgctcaatcaatgttttaaattgctcgtaaatttgtttgtatttcggggtgccgcttctgaaagcgaaaatcaaatttttcatcagatgttctcctctgacatgtgtatttatttgaaactgtatctttttaaatgtcagttgatattttattatagcggaaagcgctttatcaatccatgttcagagaggagagttttgtatgtatattccggctccatttcagctgagtgaagctgaagcgtgcgatgtaatcaaagagtatggtttcgcagcattgttttcaacggcggggggcatgccgtatgcaacccacctgccattgatgatgagtaagaataacgaatgcttatacggtcattttgcattgccgaatccccaatggaaagagattgatggccaaaacgtattagccgtttttcaggggcctcattgttatatctcgcctaaatggtatgagacgaatcaggctgttcccacatggaattatgtggcggttcatgtttacggagaggcggagcttttggatgaggaagaaaccgtgcagtcgatgagtgatctcgtattgaaatacgaaagccccgacagcccgtacaaattagaggatgtcgatgcgaaattgctggcaggcatgaacaaaggggtaaaaggttttaaaatcaaaatcagcaaaatagagggacaggcaaagctgagtcaaaatcattcagccgcaagacaagggctggtcgtacaacagctcaaacagattcctcatacaaacgaacagctcatttccggcttgatggaagaaaacatcaaacgaatcaccgcaaaaaactgacaagcatgttaaaaacataccggcagcatgcggtatgtttttttctgattatgaagcttttctcaggatgaataacgactcgaacagcacataaatcaacggcgccattaaaatgaagaaagaatgaaaaatagcatacggtatgagtaagtaaacgataagtttcaatagaatggaagacgttttattcaatgtccagcggtttttcaagatatcagtcatacaggctgaaacaaggccgaccgtcaaatatccggctgctatgtaaagataaataaaaaggtaaaacgggtaagaagacaacgggggtgtgtcttcctgtgtcatttttaaacccacataaaagaccaataaaaagcaaacggacgaaacgagagctaacaaaaggtgtttatataaatacttcttcatgtgtttcacctgcctatggacaattatttctaaacatattatgacatggttttaccgctgctgaaagaatcggcagcgggcatgcgcccgtctatatgagcggggcgtaaagaatcaatatcatcttttcatgaatccggatgttttgttcggatggatgtaaagaagaatacaccccaaaaaaagctgtcagcttggtcctgacggcttatttttggtgaaaggcttatttctccgtggtgaaataaagcaatgctatgaccggaaaagcgattccaatccataatgtgatactccacccgcctgaggcgtatgcccatcctccgattgatgatcctatagcgccgcccagaaagaagattgccataaataatccgtttaatcggctgcggaattcaggtgccaacgaaaaaatggcacgctgactgagtacgagattggcagatacccccatatccaacaggatagctgcggccaccagaactgctattccgacgggagagctgctctgaatcatgagcgggagtaataaagaaacgatgacaacaccgagagcgattccggtggcaagccgggttaagccgcgatcagccagacggccgcctatcggtgcagccgctgcacccgcaatgcccgctaatgcgtacagcgcgattgccttttgagaaaaatgaaaagcaggaccggacaatagtaaaggtacagtcgtccagaataagctgaaagctccaaatacaaacgcatgataaatggcacggcggcgtaagaccggagtcgtgcgcagcagcttccacattgaaccgagtaagacggtgtagcttgtgtttgctgttggttttctggcaggaagcacttttgataagacgattgccaggacaacacttaacgcggcggataaagcaaatatggcattccacccccatatatcagcgaccagactggatatcggacgggaaagcataataccgagaagcaggccgctcatcacattgccgacaacccggccgcgtgcggcatctggtgcaaggtatgatgcgaacggaactagcacttgggccgcgatggatcccagtccgatgaaaaacgcagcggctaaaaacagtgttccatgcttcacacatgctgtcagagttagagcggctgcgcttagtaggagcgataccacgacaagttttctgttttcgataatatctcccaaagggacgagaaacagtaggccggcaacgtatccgatttgagtcagcgtgacaatcaatccggcactgcttggagaaagcccgattgccgcactaatgaatcctgccaagggctgtgcataataaagattagcgacaatgataccgcatgccgttgcgagaagaagggttaaaccagttgaaatcccctgatccgctgtttgtttattttctttagccatatgaatgaactcctttttaatgattttatgaggtttgataaatattttgctgattcatctcctttacgcagaggcttttggagtctgcatttcatcaagacttccctcaagttattttataaactaaacgttcagttttgtttataagtgaataatatactaaacgttcagttttgtaaatgggtttctgttttcttttttatacaggttaagtatactgaacgtatcgtttataattcgggaaggaatgattcatgtgcagagtaaacgaggacggccgcgtgatgaaggaacacataaggcgattctttctgctgcctatgacctattgttggaaaatggctttgacgcggtgacagtcgataaaattgcagagcgtgccaaagtgagtaaggcaacgatttataaatggtggtcaaacaaggctgccgttatcatggacagctttctttcgaccgctacggacagactgcctgtgcccgatacaggatcaacagtgcaagatatattgacccacgccgcgaatttagcaaggtttttgacgagccgggaaggaaccgttattaaggaattaatcggtgcgggacagctggatgcaaaattggcggaagaatatcgcacgcgatttttccagccccgccgcctccaagcgaaaggccttctggaaaagggaattcagaaaggtgaattaagagagaatcttgatattgacgtaagcatcgatctcatttacggaccgattttctatcgcctgttgatcacaggtgatgaggtgaatgattcctatgtgcatgatcttgtgatgagtgcgtttaagggagttcaagctacgtgaataaccgccgctcgaatcgggtgaaaagtatttgtgcctatggggcagaaaataatgaaaaggcagaacaaattgttctgccttcttcgctctatttgcgaaccgcccggcggccgccacgcacgtaatcaccgccgcaagccccaataacagcccgaagaaaggctggagaagctgcagagctgattcgcgggagtttcgttgcctgggcgctgtaaaggcagttctcagtttgacatactgaagctgagccagaggtgctgtctcagcaggaaaacatttataggacgggcaggcggagcgccgtatcaatattttgcaaattaaaccggacttgttcatctgtgttccacggatgataccagcctttttccatcatatagcgtgagatttgctcatgcatgtcgatggcttcttctaagtgacgggtgaggatcgctttcacttcaggcgttccggcttccgtcgccgccatcgcatagtttctgactccgctttttgccgaattcaataaatccatagcgacaatttggtctgtcagtgcatccatccccgtcaggtattcaataatcggattcattcgtcattcatctcctattcgtgctttgcatcagataaaatcgaggcaaattcctgcaattgccttgttgatgtatccgcatcctgctgcatgatttctttcagctgcggatcggatacgagcgctttcatggttttggatttcgtcaggcaaagtgacttaaaagaagccatctcctgaatttcgagtaattcatgtaaggcgctggccatttctgtagcctccgttctctaaggtttgagtacaactttaatacaatcatctgttttcgtgtcaaacatctcatagccgtgcttcgcttcactgagcggaatgacatggcttacaacatcacccggatcaattttgccggttgacaccagttcaaacatatacggcatataatggataaccggagcttgtcctgatcggatattgacgttccgctgcatgatatcgccaaggggaaatccgttgtatctgccgccgtacacacccgtaatctggatcgttccgccttttcgcaccgcttgggacgcgatgaccaatgcgctcatggcccgccttgaagttttaatccgctggcgaggaactcaagatctgtcatttttccgtccatgccgacggcgtcaatgacaacgtcggcgccgcctttggtgatttccttcaggtagctgcccgtattttcgtggtcttcgaagttcacgatttccactttattcgtccgtttcgcatgctggagacggtagttgacatagtctacggctatgacgcgtttcgcaccctttaaccagcagaatttttgagcgaaaaggcccacgggcccgcagccgagaacgatgaccgtatcgcctgcttttacgccggcattgtcaacgctccaaaaaccggttgtcatcgcatcggcaataacactcaatttctcatccggttcttcgcatgtttcggggactttaaaatgggtaaagttcgcaaaagggacgcgcaaatattcggcctggccgcccggatagccgccggtactccctgaatagccgaaataagcgcccatatcgccgttttcatttgattgatcacattggctttccaggtgatttttacaataagtgcattctccgcaggcgatattaaaaggaataatgacgcggtcgccttttttgactttcgtcacgccgggaccggtttcttccacaatgcccatcggttcatgcccgataatatagtcttcctgcaagttcggaatgagtccgtggattaaatgtaaatctgatccgcaaattgccgtacttgtgacttttataatcatgtcatcgtgtttttcaatcttcggatcaggcacgtctttgacgacgacgtttttcactccttgatacgttacggccttcatgctgtaatacctccagtgttagtgttcatcaggtgtgcggtcaaacatcccttttctgttcgtttcaacgggaaacagattcatgtttccgaccatgagggtatttttcgcagagagctggtccagtttatactgttcgctcagatcatgcgggtgaaaccactttttgctgaccatcaagtctgtaatttcctgatgcatcgcgattccttgcatgagctgtttgcgcagcaaagctcttacatctggcgaggcggtttctgttaaagcaacggcggtatttctgacgccttcttttgcgcgtatgagaaaatccattgcgaatgtcatatctgcgagttcagggacgtgtaatgaattgattggatctaaatggtcatggttcaatgatgcttaccttcctttcaattgatgatcgaagtcggccggttttgaggaacaggagcctgaaacgttgcccgttcataaaccgcctgcagatcagcaaggttttgcgaggcttgctgaacgtctttttccattaacgttttcagatcctgatcaaacacaagcccttgcatgagcttggatttcgctacacaaagcgtcttgaagttaatgatttcatgtaagtccagcgactcgtgagccgctaattcacgcttttccataatcgttttttaaacctcctcttctcaattacataattaatttcccctgagaaaagagctctagtcttacaaattttgtttataaaaaaagagagaagaaatttgacggtacattaaaaaagaggaagcacaatcgcttcctcttgttcacatggaatggctgtcggtgtcctgaacgtttttctgatgcgcgggcggttttgccgcgcgggagacagaccgctgaaacccgggaaaggtcataaaaaagatatgaacaaaagcagcccgcgaacaatcccgcaggctgttttttctttcacccgtcaagcaggacagaaggggaaggtgagaagcaggcgattatggtatgatgacaaatagaataaaacatcgtgaggccggtcggctaaaaggaagtggacagagattgtttggtacaaaacatcaagaagactatgtctcccgtgacagacgctcattgcatatgcttgcgcttcgggtgcccggtctggcgtttatttttatggtatatgccgcatcagtctctttgcagtacatttatgaaagctggacggttttattgctgctgttattcacgatattgatcgtcatttttgctgtgctgcactggcattcctatcgctgggtcaagaaaaaaacgtttctttatttcatcatacagggatttatcatatatacatcggctaacttgatgaccggcggctatatcgcggcggtcatcggtctctatgcctttttaatcgggcagattatcggaatggcggataagggcaaaacgccgctcatactctatcttttcattttaatgtccatagcagccctgcaccaggagcatccgcatcatctgcttcgtttcatcgttatcgccgctcccatcatgatcgtgattatcacatatgcggcaacatttttcgcgcaagttgatgaaaaaatcaaaacacagatgacgcttgaaaaattagagctcgctcaccggcaagtgaaacagctgacgcttcaaaacgaaaggcagcggatggcgagagacttgcacgatacacttgcacaagggctggtcagcttgcatatgcagcttgaagcggtgcatgttcatctttcaaagggtaacactgacagagcgaaagacatcatcagccagtcaatggacagagtgaagggcacattggctgatgcgcgctcggccattgacaaccttcgcagcaaatcagaagagatcgggttcttaaaagaaagcatcactgaacaaatcaaccattttacagaagcctccgggctgtcttgttttttagattacagcgtgcatcatgtgcttgacgttcatacggcggagaattgccattacatgatcggagaaggcctgactaacgccgccaagcatgcagaagcaaagaatgtctgggtgtccgttcaggaagaagagggacagatccgcataaccgtcaaagatgacgggaaaggctttgatgccggaacagaaatgagaaaaagcggacattacgggctgctggggatacaagaacgcgtcaatatgatgaacggcactttccgtataacaagcgccagatcagcgggaactcaaattgagatcatcataccaattcaaggagaagcggaacatgtataaagtgttaatagcagatgaccatcttgtcgtcagagaaggtctgaagcttttgatagaaacaaatgaccattacaccataacgggagaggcggaaaacgggaaaaccgccgtccgcctcgcagcggaactaaagcccgatgtcattctcatggatctgtacatgccggaaatgagcgggctggaagccattaaacagataaaagagcattctgatgtgccgattattattttgacgacctataatgaagatcatctgatgatagaaggcatcgaatcaggcgcgaacggttatctgctgaaggacacaagctcagaaaccttatttcatacgatggatgcggcggtcaggggagaagtgcttctgcagccggacatcttgcggcgtttccgggaaaagaaaatggaacgggcaaatgccaatgaaacacagctgacggacaaggaaatcatagttctgcaagccgttgcgaaaggacataaaagcaaagcgatcgccttcgatttaggaatctcagagcggacggtaaaagcgagattaacatcgatttataacaaattaggcgctgattcgcggacggaagccgtcaccattgctatgcaaaaaggcattctgaaactgaatatataatgaaaaactgcccaaacgtacatgcccctatgtacgttttttttatgtgaatgtgaactacaattaggcagaaagtaatgattggagaggagtattcgatgtctggttttttatataaattagggggatggtctgcccgcaaccgattcaaaatgatcagtgcgtggctcgtgatactgatcgcttcgattgtgatcgccatctcgttaaaacctgctttttctgaggatatgtcaattcccgacacaccttctgaaaaggcgatggatgtgattcaaaaagaattttcaaaggggcccgataaaggaagcatacgggttattttcggagctgaagacaggaagaaattgacgtcaaaaccggaaaaacaagcgattgaagagacattaaagaagatcaaaacagatcattcggtcgcttcgattgcaaatccttttgaaacaggaaccatttctaaagacgggtcagtggcatatgccgatattacgtacaaaaaagcggcggatgacattacggatgcgtctgtttcacatattaaacacagtctgtccgccgccggagacaagggcctgcagacggagctcagcggcgatgtgccgggggccggtgttgaagccggcggtgtatctgaaattgtcggcgttgtgctggctttcgtcgttctggccattacgtttggttcattagtcatagcggggctgccgattgtcacggccctgatcgggttaggtgtaagcgtcgcgctgacgttaattgggacacagatctttacgatagcctcggtcagtctctcattatcaggaatgatcggcctggccgtcgggattgattatgcgctgtttatctttacgaagcatcgtcagtttttgggcgaaggtgtacaaaaaaatgaatcgatcgctaaagctgcgggaacggctggcagcgccgtcgtttttgcgggactgaccgtgatcgtcgcgctttgcggattgaccgttgtcggcattccgttcatgtctgcgatgggattgactgcggcactcagtgtgctgatggctgtattggcatcagtaacgctggttcctgcggtgttgtcaatcgcaggaaaacggatgattccgaaatcaaacaagaagaaagaaaaggaaagcgccgacacgaatgcctggggacgcttcgttacaaagaagcctattctgttaagcattttcagcattattcttttagctgtcatcagtctgccggccatgcatttagaactggggctgcctgatgcgggaatgaaagcgaaagacagcccggaccgccgcgcctatgatctgttgtctaaaggattcggcgaaggctttaacggcaagctgacaattgttgccgatgcaaaaggagtcaaggggaataaaagtgaagcatttcaagacgccgtgaaagaaataaaggacttgcacaatgtggcgagcgtcacacctgccatgccgaatcaaaaaggggattatgccatcattacggcagtgcctgaaaccgggccgaatgataaggcaacgaaagagttagtgcaggatatacggaaacgatcagacaaaaacggcatccgcctgctcgtcaccgggtcaacagcggtgaatattgatatttcagaccggttaaacgatgcgattccgaaattcgccattcttattgtcgggtttgcgtttgtattgctgaccgttgttttccgctcgcttctcgtgccgcttgccgccgtcgtcggctttttgctgacgatgaccgctacactcgggttatcggtattcgttctgcaggatgggaatttcaccggcttgctcagcattccggaaaaaggtccgattctcgccttcctgcctattttagccatcggtattcttttcgggctggcgatggactatcaagtattccttgtcagcagaatgagagaagaatatgtcaaaacaaaaaatccggtacaagccatccatgccggattgaaacatagcggacctgtcgtaacagcggcgggactgatcatgattttcgtctttgcgggattcatcttcgcgggggactctacgatcaaatccatggggttggcaatgaccttcggtgttcttttcgatgcgttcattgtaagaatgaccatcattccgagtgtcatgaagctgatgggacatgcggcctggtacttgccgaagtggctggataaaatcattccgaacgtggatatcgaaggccataagctgacacaaggcaaaacaccggagaaaccggaagaataaaatgaaaaagcagatcgttatgatctgctttttttatgtgctgaccgcattcatgaacagagaaaaaagctttttcatgtcttcatgtttttttgtcagcatttcgggatgccattgcacgccgacgacaaataattcacccgttcgttcaatcgcttcaatggccccgtctttcgcataagccgcggctttaaatgaaggcgccgtctcttttatgatctggtgatggaatgaattcacccgcgctgaatcgccaaacaaggtatggagacgtgtccctttttcaaaagaaacatgatgggtttttaacggcggatctttttcttggtcatgcttaatgtcagcaaacgaagcgtgtgccaggtcttgatataaagttcccccgtaagtaacgtttaacatatgcatcccccggcagatggccagtatcggcttttctaaagcaaccgccgtgagaatcagctccttttcgtaggcgtcccgatcaggaaaggtctttcttaaagcctgtaaaggttcttcgccgtaaaacagcgggtctatatcctggccgccggacagaatgatgccgtcaacatgagagacctgttcctttaaaagcgccgtctcttgaatcaccggcaatataaacggcacaccgccggcctcagaaacagactgaatataatcattattgacatatgcccgattataacccgggaaagggccggattgatcagccataatgtttcccgtaattccgatgcgtttggccattctgcgttcacctgaacctttctttctgaaccttctcgtatgaatctgaacgtaggttgtacaaatcagtttgaaattattcttcataatacgtgaactttccaaaacaaaacccgtgacaatcacgggtttttacattcatttcaacttcttgatttcttccgtcagctctttgaacttttgatcaagctcacgatattgtttatcagccggagtcatgaagctgagttttccgaggacttcctgccgttcggtttcaaactttaatcgcagttcttcagcatcatccctgacggagggagattctttccattgttttcggacgctgccgtttgagatatcaagccggatgtccgtcgtcttttcgacaaagtaacgatcatgcgatacgatgatgagcgttccgtcgtatcgggccaaagtgtcttcaagctgctcgcgtgacggcagatcaaggtggtttgtcggctcatccagaatcagcacatctttctcccccagaataaacgccatcagcttgcatttgacccgctctcccatgctcatcttgccgatgggttccgtccattgcgctgcggtaaatcctaaatgcttcatgagggattgaacatttccccttgcttcgaacgtttctttgtaaaaaagctgttcggggttttatcaagcggaaggtcgaatacttcctgggttaaatagccgacgtttgcagacggagaaatccatatgccgccctgcgctttttcctgaccgaggatgaccttcaataatgttgttttcccgctgccgttcgggcctgtaatcgcgatcttttcaccgtgcatcacagtgaaattcacgtttttaaaaagcgttcggccttcatatgactttgtgacatcacttacttctaaaaaacgctttcccgcttttttgcggtgctcaatggaaaaacggacttcatactccgcttcaaccggttctgctttcgctttttcaagctctttttcaagacgcttctgctttgatttaatctgggcgtccgtgcgttttgcttttacgcggtgatattctttaaagccttctattttcgttgattgggcgtgggctttttttgaccaggcgctcagctcgttcatttgagcttcaatccgtctgatcatatgctgctgattctcatattcccgctgctgtgtcagccttctctgtttgcggacctccatatagcttgaataattccctttatgttcaatgagtttctttccttcgatggcccagatttttgtcgccgccgcatctataaaagcacgatcatgtgaaacgaaaataatggtgcctttgtaattcttgatctgattaagcagtatttctaaactgtgctgatcgaggtggttcgtcggctcatctaataacaaaaggccgcttgaggaggagaaacctttggcaagacgggctttcaatttttctccgccgcttaattgcgaaaaggcgcgtgcgggcacgttccacttttctaacaaggctgcctccgcaggctccggatggccggaatcataagcttccgtttcttgttccaccatatatatgttcacatcttgcatcatctggatctgtccttgtgacggcgcttttttattgcagatcaattgcagcaataaagatttgccggcgccgtttttaccgataacaccgatgatgtcgccttgctgaacactcgcgctgatctgttcaaaaaggggaacgctgttgatttcgtaactgatgccgcttatttttaacatttctttcatatgtcaatccctcgctttaaagggaggacaaaaaaatcctcccaattgatttggaaggattagccgtacctgtgcgtgatcaaataagctatttttacatagctttctcgtatcgtatagaaaatgggcagactaatcctattttttctgatttgaaatatttgatttcaaacggtcaaaataagattagttaatcattgtccacccatcatcccttcgtatttgttacgaacagtgtagcacacacttatctgtaaaagcaaagggtataagcctttttattccagatcggaggcttcccactcttcttctaaaacggcataataatattcatcccaccattcattatcatgggggatgcattttttaaacaagccttcccgcctcatcccgatcttttccatcacccggtgcgaagccatgttttccggctgacatgtcgcaatgatccggtgtaatttcatcttgttaaacccgaatgccagcacggcgcgcgccgcctctgaagcatatcctttgccctggtattccgggtgaaacacccagccgatttcatacgtatgatcgccaaaatactgaaaaaaaacaatgtggccaatgaccgttttctcatccttcaataaaacgggaaacttcccggcatgttcaccgctgttttcagtaacgaatttcctggcatcttcttcggtaaagacaccctctggtatatatttcatgacactcggattcgaggtgtacgcatagacatcctgccaatcttccggttcaaatgtccgaatgacgagcctttcagttttgatattcatttttttatgttcctccatcaaaaaaggtttcatttactacttcgattgaaagatgtaaaaaacctttgagcggggaagagccgaataaaaaaagcctgcagctatacactgcaggcggttatttttcatttgcggcggcgggcaggtttgtaaacccgaattgccctccgacagcttcttttacttcatgaataacgataaatgatttcggatcaattttttgaacatgttttttgattttcagcaattcgttctttttaatgacaacatagataatgcgcttgtctttgctgccgtaatacccgtatccgtaaaaaatcgtcgccgcgttgccgtactcggaggtgatggctttggcgatttcttcgtattggtcagacataatggtgagggcttttttattatggaaaccctcaatgacaatatcgacgattttggcgcacagataaacgaatataaacgtatacagcatatgattgattccgatcgctaaaacggatgcgaaaatgatgacacaatccatataaaacatgcttttggagatgttaaagccctttgtgtaattcaataaatacgccaaaagcgtggtcccgccggtagatccgtcagcgataaagatcaatgccagccccgctcccatcagcagagcgccgaatacaatcccgagcaccatgtcgtgcacgccgaacggaataaagctgacgatgctgagaaaaacagaagtcattcccgtaccgagtatcgtgtataaaatcgtttttttcgttaaaaatttataagccagcccgataaaaatcaaatttacaaccagagtcgtaatacttgcaggtatatggaaaagataatataaaacgagagcgattcccacggtgctgccgtcccctaaatgattcgggatgacgaaaaattccacggacgccgcgataagaaaggctccggccataatcatcagtatatccttgcaaatgttcttcatgtgcaaacctcctccgcagtcaaaaatatatataaaacaaaaacgcctcaaaaattatccagcagaactaaataatttttaagacgaatcattcacaatctcgtttgttcattcagtaaagaatgatcagcttcaatatcgaagattatatagacaccttcacatcttgtcaatgccgtgaaaattgattttctgcagtgtatatgaggtttaaaccaagttaaaacgaggaattatatcagaagagttttcatttccgctctatcaataagagaaatgtaatgagagacaacgaagaagggatgatgacattggaacgaatttttatcagtccggccaaatacgtgcagggaaaaaacgccattgaaacgatcggcggacatctggagggcgttggtgaaaaagccgtcgtcatcgcggacaaaaccgtatgggatatcgcgggccacaaggtgacggctgaattaaagaaaagcaatatctcttctgaagaggcggttttcaacggcgaagcctcccaggaagaaatgaaaagaattgccggcatcgcagaaaaagcaggggcgactattgtcatcggagtcggcggcggtaaaacgcttgatacggccaaagccgtatcagatgaaataaacggctacaccgttatcgtgccgacggccgcttcaacggatgctccgacaagcgggctgtctgtcgtgtattctgaacaaggcgcgttcgaaaactatcgtttttatcataagaatcctgacttggttctggtcgatacgaaaatcgtcgcggaagctccgccgcgctttttagcatcagggattgccgatgcgatggcgacgtggatagaggcgcgcagtgtcatcgccaatggcggtaaaacgatggcaggcggaattccgacaatcgccggagaggctatcgcggaaaaatgtgaagcggtattattcaaatacggccgtctcgcttatgagtctgtgaaagcgaaagccgttacgcccgcattggaagcggtggttgaagccaatacacttctgagcggactgggatttgaaagcggcggcttagctgcggcacatgccattcataacggatttaccgcgcttgaaggtgaaatccatcacttgacccatggtgaaaaagtggcattcggcacgctcgttcaattggcgctggaaaaacgttcgcttgaggaaattgagcggtatatcgcgttttatatcagcttggggctgcctgtcacacttgaagacatcaaaatgaaagacgcatctaaagaggacattatgaaagtggcagaagccgcgacgattgaagaagaaacgattcatgccgcttttgacgtgacggctgacgacgtggcggacgccattatagcggctgatcaatacgcaaaagcatttaaagaaaaacacgcgtaaaaccttttaccgcgtgacccggaaccaagggctgttacagcccttggttttttttatgccctttgaaaacttttaaaaataaagaaaaaattatgatacaatatacaaatgttttgagagattgacaaaggaaaggtgggaacgatatgctgcataatccgaccggtaaggagcggcttgcgctggcttttcttctcggaatgcttgcgatactggggccgctcaatatagatatgtatctgccgagtttccctgaaatcgccgaagatttaagcgcccgcgcttcgcttgtccagctcagtttaaccgcttgtctgatcggactgacaatcggacaggttgttgtcggcccgttaagtgacgcgaagggaagaagaaaaccgttattgctatgtatttttttatttgctttgttttctctgttttgcgcgcttgcaccgaacatttcaacactggtgattgcccgttttcttcaaggattcaccgcttcggcgggactcgttttatcccgtgcaatcgtcagagatgtgtttacgggaagagaactttctaaatttttctcgctgctgatggtcattaccgccgtcgcgccgatggtggcgccgatgacgggaggcgcgattttattgcttccgtttgcatcatggcatacgatttttctgtttttaacctttatcgggtttttgcttgttctcatcattgcgctcaagctgacagaaaccctgccgccggaaaagcggattccgagctccatcggaaattccgtgcggacaatgggaagcctgctgaaggatcggtcatttatcggctatgcgctgacggtcggttttattcacggcgggagctttgcgtatgtctccggaacgcctttcgtgtatcaggatatttacggagtatcgcctcaggtattcagtgttttattcggcataaacggtctggcgatcattaccggaagctttatcatcggccgtttcggcgggatcattcacgaaaaaagcctgctgaaaatcggcgtgattacagcgatgacggcgactgccgttctgctcgtcatgacgatcattcacggaccgctggcggcactggtgatttccatttttatttatatgattacgatcggcatgacgctgacaagcacctttacattggcgatggaaaagcagggacaccgcgcgggaagcgcaagcgcactgctcggcatgcttccgcttcttctcggttccatcgtgtcgccgcttgtggggatgaatgaagcgacggccgtgccgatgggggcaattatgttcacgacatccgttatcggttccatcgctttttttgccttaacaacaaaaccggagaaagcaaaaaaggagtgaaatgattcactcctttttttgatgcccgctattcatatttcttcagcacgatcgccgaattatgtccgccaaagccgaatgagttggaaaggccgatcgttaacgattgatggcggggcccgtctgacacatagtccaaatcacatgccgaatcagggtgctgcagattgatcgtcggcgggatgatgccgtgtctcaggctttctgtcagagcgatggcttcaacgccgcctgccgcgccaagcatgtggccgagcattgatttgttggccgtaaccggaatgtcatacgcaagctccccgaataatgttttgattgccaatgtttcagaaagatctccggcttttgtgcttgtcgcgtgggcgcttacgacatcaatgtcttccgctgaaacgttcgcctttttcaaagcatttttcatcgccaggtatgcgcccgtcccttccggatgggaggccaccatatgatacgcgtcagagcttgcgccgtagccgagcacctcacagaggatcggggcgtttctgccgattgcgctatccaatgattccaatactaagatgcccgcgccttcactcatgacaaacccatcgcgatcagcgtcaaacggccggcttgccgcggcggggtcttcgtttctcgctgacagcgcgtgggcattgccgaagctggctaatgacaaattcgtaatcgccgcttccgctcccccggcaaacataatatctgcgtcatcattccgaatggcgttgaatgcttccccgatcgacgtattgccgatggaacacgcggtgacgggagaaagtgaggggccgagcgcgcctaatctgatgctgatttgagcggcggccgcgtttgagatcatcatggggacaaggctcgggctcacttttcgcgctccccgttcatttaaagtatgaacgttatcaatcaaagtcgtgatgccgccgattcccgagccgacgtacacgccgaggcgttcacggtcaatctgatcgagctgaatcccggagctttcaagcgcctgttccgctgccgctaaagcaaactggctgaaacggtcaagccgtctcgcttcttttctgccccatctttcttctgcgtcaaaatcacggacggtgccggctatttttgtcttggagccggagacatcaaacgaatcgatgagagaaattcccgatgttccttccgtcaggtgtttccaaaatgtatgcacatcattgccgagaggtgaaatcactcccattccggtgatcacaactcttttcatggtcattcctccttcggtatgtatttattgtaactcgcaattatcctattacaagttgttgattatcctagtataatgaataccagggtaagagaggagagattcggtatgataccagaaggaagattgcaggcgctctcagagtttttaaaaacgcagcgggccaaaatttctccgcagatggccgggctgccgatgggcacacggagaagaacgcccgggctccgaagagaagaggtcgcgcaattagcaggcgtaagcaccacgtggtatacgtggctggagcagggcagagacattaaagtgtccgcagccgtattggacgcggtttccgatgcgctgcagctcaacaaagatgagagaaattatttatacgcgcttgccattgaggagggcgtgaagcagccgtttgccgcggaggaagaagcggttatcagcccgtcgctttcaaaaatcctgcaggagctccgttattgtcccaccattatctcggacaggcgctgtcatatcgtgggatggaatcaggccgcggctcacgtgtttttagattttgaacaaattcctcctgaaaaacggaatctcatagagctattgttttccagaaaagaattaagaagtttagctgtgaactgggagcactttgtgaaaggattcatcgccattttcagaacgtactacggccagtatgtagctgatacgtggtattctcagtttatagaagaaatggagaaaacgtattcggaatttcatacgctgtggaatgagagcgaagtcagctcggcacccgaagtattaattgagttccgccacgcgaaggcgggaaaaatggtctttaacctgacttcatttcaggttcagggcaacagtgatctgcgctgcagtgtgtatacgccggtagatcataccgaaacggaagcaaagctgaaaaagctcttcgaaaacaggtgaagaacagaaaaaacgggaggcggccgcctcccgtttcagtttaaaataaaagcatgagaccggcgatggccggtgttaaaaagatggctgatttcagaatgactttcggcacgtggttggtgaatttcgctccgacatatgcgccgcacatcgtgccgatcagcactttgaccaacagtatataatcgacaaatccttccgtcacataaccgagtcctccgccgaccgcaagcgggataatgacaagcatggtggtgccgaccgactggcggatggataagcgcaaaagaatcattaagccgatctggatgaaaggggcagagccgatcccgaacgttccggacaagattcctgcgatgataccgagtacaacggctttcacccatatgttcagattgctttgccgtccggaatcttcatgtgtttcttttacaataaataaccggactaaaataagcagagcggataaaaacagcatgcccgccgtcaagtaatgcagcaaatctgcagggataagggaagtaagccttgccccgaaaaacgaaccgaatgccgcaaaaacgccgacgatgaggccgattttcatctgaatattgccttcacggtagtggctgaaagcccccgataaacttgtgaaagccattccggcgagggaggtgcccaaagccgtatgaatcggtacgtgaaacagtatagttaaaagtgcaatgacaaaaccggctccccccgcgccgataaaccctagaataatcccgagaaggaacataacgagtataataagcacaatcttctcctccatttagatgcctgatcaccatgttcagatccgctttatcaggtttttaacaatcgatcgtcgtccgtcgaccgtcgtccattatctttatgttacctcaaatttgagggattggcaagaagccgaatcgcttttatacagagggtttacagctctttcaccatcactttttccccgtttgagtccagctctccattgaataagaagccgaatttttgataaagccgcaatgcgtgcacgttatcttcaaacagacttaaataaatccgtctgcactcatatattcgaacgagatggcggataagggcatcaagcaacagcctgcccaatccacgtccctgataacgttcatcaataaaaaaacggtcaagccacactctgccgttttcattttcctcatcatattccggaaaccatccgtacatggcaaagccgactaattccccgttaacataaagaccggccggctgataatgccggcaatcctcagcatcttgtaagcactcttccgcggtttcaataaatgaagtctggctttcccttacatgaagcgccagtatatcagcacggttttcttccgtgactgctctgatttcaatcgtcatacttgatactcctcttctgctttttctgagacggtaaagctttcattgcgtaagccatttgtgaatcagccttctctcggatacaatgatcatcataaaggatatggttaccgtatagtcaaggaggcattatgagcgaagacgtcagaaaatacttcacaacgggtgaatttgcaaaactgtgccacgtaaaaaaacaaaccctgttccattatgacgaaatcggcctgctttctccggaaatcaaaaaagcgaacggatacagatactattcctatcatcaattcgaactgttccaggttatcggtctgtttaaggaggtcggcgtgcccttgaagcagatcaaaccgctcttaacagacaaaacccctgagggtatcatcacgcttttaaaagagaaatcatcagaaatcgaaagcaaaatcaaaaagctggagcacctgcaaagaatgattcagacaaaggtgaagctgaccgaacaagctttggagacagacttctcctccgtctcattgcagcgattagatgaagagacacttatgataggacgacccgtactccatttgccagaacggcaatacactgcggccatttccgaattgatccgctatatgcgggtacatgaactcgatcaggggcatccggtcggcggactgtttgcgcgggagcagattctgaaaaaagaattctacaactacacccatttttatatgaagacagaagaaggcatagagaataatgacctccatatcaagccgaaagggctttatgccgtcgggtaccaaataggggatgaagcggaagcggcttaccgcagcatcatgcagtttattgaagagtatgggctggaaatgggcgattatgcatatgaagaatatttgcttgatgaggttgtggcggacgggtttgacaatcagatcacaagaatccagctgcaagtccgcaatcgataaagccgatgccgccgttcgtttacgtcttctgacaaaccttgtataatgagaaaaatcagattgcaattgaggtgaaaaacgatatgtttctagcgcccttatttgaacatgatgtaccggcagcacttctccgcccttaatggaggaaagtgactgcgcttctctccgttaaggcatatgacgtgacctaatatgataacggagggtgcatcaaattgaaaaatacattgttcggttcgatttatttggcattggccgccagtatctggggcggtatgtatgtcgtcgttaaagtagtggtagcggtcattccgccgcttgaactggtatggctgagatatgcggtggcgcttttttcgcttttgattctcagtttatttacacgccaatcctggaaagttcataaacgtgatttattactgatcgctgcgatcggattgatcggcaacacgatttcgatcgtcacgcaggaaatcggcacgaaattatcaaccgcgcagatgggtgcgattattacggcatccactcccgcatttatggttgtatttgcccggctgattttgaaagaacggttaacgctgaaaaaaggaatatcgacagggctggcgacgatcggagtattgctcattgtggggaacggagatctcaatatgtcgagccagttcggcggtctctcgcttctggctggggcgctgacatgggctttgatgtccgtgctgatgaaacgggttcccggccattactcaccgcttgtcgtcacaacgtattccatttgcgtcgcatttgtcatcctgaccccgtttacagagggcccgcttcgggagattcctttgtctcagcttgcccggcctgagatatggggcggacttttatatctgggtgtgatctcaaccgcctgcgcgttcatgctttggaatcgcggattacaattgctgaatgcggcaagcggcggtctgtttttcttctttcagccgctttccgggacattgctcggctggctgctgctgggagagacgatcggaggaaccttctggatcggggcggcccttattgtttcaggcgtcgttctcgtcatgaaagaaaaatagaaaatgaaaaaaagccattcagcaaatgaatggctttttctgatttcccggcaggattcgctccgccataaacagaaaacaaggagcagaaacggggtactctcaaggtgcaattcgggtttcgtttaattaacataacgggcggtggaaaaaatggagccaaaatggcttgaatgggcaaaacagcttcaatccgcggcgcaagcggggctggcttattccaaagacatatatgatattgagagatttgaagaaataagaaaaataagcgtggatatcatggcgcaacataccggcatcgacaaaagcatcatcaaagacgtattcgccggtgacacgggctatcccactccgaaagttgatatcagagcggcagtttttaaagatcagagcatattaatggtaagagagaaaagcgacggcagatgggcgctgccgggcggatgggctgatatcgggatttcaccgggcgagaccgctgtcaaagaagtaaaagaggagtcgggaatcgacgtaaagcccgttaaactgttagctgtaatggataagaaatgccattcccacccgccgtccgccgcccacgtttacaaagtgtttatccgatgcgagatcatcggcggccggctcagggagggaacggaaacaagcgcggccggcttttttgcggaaacggaactgccgccgctatctgaagcccgcaatacggaaagtcagattgaaaagatgtttgcatatctcaaacatccggacgaacccgtttattttgattaaggcagcaagcagaaagaaaagggggcccaagtataatggaggattcaattaaacagcaggcgcagcggcaatttgctaaaaacgccgcgaaatatgtgactagtcccggatacgccgcaggagaggatttggcatatctcatttcagcttccggtgccgaaaagcatatggacgtgctggatatcgcgacgggaggcggacatacggctaacgctctcgctcctctcgtacgctctgttatcgcatatgacctcacggaagaaatgttagcagccgctgaagcatttataaccggaaacggatggacgaacgtgtcattcgaaaaaggcgatgctgaaaagatgccgttttccgatgctgctttcgatatcgtcacatgcagaatcgcggcgcatcattttcccgatgtcagagcctttgttcatgaagcgtttcgggttgtcaaaccgggcggcagactgcttctcattgacaataccgcacctgaaaaggatgaatatgaccatttttataatgacattgaaaagaaacgggatcagagccactttcgggcgtggaaaaaaacagaatggcttcgttttctggagacagccggcttccggattgaatccgctgtctgctttttgaaaccatttcaatttaccgtctggtgtgaacgggcaagcctgactgaagagaaagccgcattactggaaaaacagatgctggatgctccttgtgatatacagcggtttttttctgtagaaaaggatcaatcaggccgtattgcgggcttcacaggtgaatcggcctgtttctgcgcgctccgtcccgtctgagacgaaaaaaccgctgtgcagttttcctgcccgcggttttttcgtattatctgttcttgatttgagaaataatagcggaagtgacatcttccgttgaatgttttccgccggcatcaggagtcagaataccgctgtttgtgaccgtttcaatagattgtaagaggagatggcccagttcctcttctccgaatgaatcgagcattaatttcgccgtccatatttggccgataggattggctattccttttccgacaatatccggggcggagccgtgaacaggctcaaacatggaaggatatttgccgtttacattgatgttggctgcgggagcgattccgacgcttcccataatcgccgcgccgatatctgtcagcacatctccgaacagattcgaagcgacaatgacatcaaagcgttcgggctgcgtgacaaagaaggccgccagtgcatcgatgtgctgggaatccgtctcgatcccggcgtactcccggctgacctctttaaagatgtcatcccagaacggcatcgagtgaacaataccgtttgatttcgtcgcgcttgtgacgtgtttccgccgattgaaacaagtttgtttgaatgctgactgagtgagtcaactccttaatcctccctgcaatccgcatactgttgactcactctgggaacgcatcatcacacaggctccctgacatgcagatcgatttccacttcagttttcctttttcattttgcacatttctcctgtaataaaaaaaagcaggccatcgcctgctcattatgtattacttagtcttatctatatttatattttactccagataccttagtagatgcatttgaccacttataaacggtaaccgtgtaagaaatctctaaaccctttttcttagaattagcagttttaaaaggcttaatcatattattagctcctacttgatacattaaaacacttaaaccagtagaagggtgtaccaacccaataatataaccgagaataagccctttattagaccccatgctgttatatctagaaaccacttttttcacctgattttttgtgtaataaacctttaccctttttttaagaagaacatcattatcacactgagtcccaagatttgtccgtcgacaagctgcttcagaacttggagcgaaagcagacaacacagtagcgagaatacaccccgctataaataatttagtaaccttctttaacacttttttctctcatcacctttactccgtttcgcaatgctataaatcactaatgcaccaacgaatatagcaaacaaaacagttaataatacattacttaagtcaaatacagaattaagtaataatactataattatatataatatcaaaaaaagtaaaatatttttttcatattttttacctctctaacttttttgtgtaaagacatatttgcggatgtaagatgccaatagaccatcttaatcgacctgtcttgtaggtgtatcctcttttttcaccacaattaaaggaggggttaccgtttccttgcagttcccctgctgcgatttgacatacaattttctctctctatctctgtaaaaaattgtatcatttctttgtcaaaaccccagccgaacgctgccggttcgaaaacagatcactcattccgtaccccgccgggaaaggaccgcgtattgaatggcgatttcatcttcaccctgatagatgctgctgccgacagagctgtactcaccttcccggacgtttacagatcaaaatcggagatgtagttaccggcgtatcttgatgggcagcccccacagcgaaacatgatcggggacgagtttttgattccccaccgctcccaaaaacaaagcatcaaagtgctgtaacgtttctaatccatcatccggcatcatagtcccgtgctccaaataatactcgcagctccgcggaaaagaagtgaaatcaaaggcaatgcctccatgtaattcggcgatcgcgttcaacacccgctccgcttgcggaacgacttctttccccacaccgtcccccggtatgccggcaatctagtatgtcttcatgtttccgtcacctccgaatgaattgttttcggtttacggaataccctcgaccaactatacttccatattacggcacctccgttatgctgacaagctctggaatgttgcttccatagataaactgttatatgatcttggtaacaataaggcctaaattgtatgaagaggtaggaaagatggataattttaaattagataagccaatcccgtattatctgcagttttattcccaattgaaaaaaatgatatttgacgggatttttaaaccgggtgaacggctgaatgagactcagctggcgaaggatttcggagtcagccggtcgccggtcagagaagccatgcggctccttgaaaaggacgggcttctgacggcagacgatcgaaacggctttgtcatttattctttgtccgttaaggatgttgaagagatttatcaaatcagaatgtcacttgaatcattggcggtcgaactggttattgatgaagcggctgagagtgaaattgacctcattgaaaaacagctgcgggagacggaagaagccatcaataaaggcgtcaaagagactgagattatttccttaaacgagtcgtttcatcggctccttgtggatttcagccgcaacagccggctggccatgctgcttgagcatgtcaatgtgctgattcatttttgcagagttcttaattttaaaggagatgaccgtgcggaggttatcctgcatgagcaccggaaagtctttgaagaaataaaaaagggcgataaaacaaaagccgtgcaatatatgacggagcatctcaagcatgatgaagaacatctgaaaggtgtgctcaaagcgggtgaaacagacgaatcatcacgatagacaaggtgaaaagccttgtctttttttgccgatgtcatcgaaccgtcataaagacctgacgaatgttccttgcatgattttttccgcgtcatttatgatggatatggaagagacgcaaaaaaggcaaaggagtttgaaaaatggcgaaacatattctgatgatcaattttcccgcagaaggacacgtaaacccgactttgggtatgacaaaggccttcagcgaacggggcgatcacgttcattatatctcaacggaaaaatacaaaagcagactggaaggagtaggagcgaaagttcatcttcacagcgatctgctcagaatgacacccattgatcccggcagtccgtccggcatacttgcatttttaaaggttcatatcaaaacgtcactggagattttacatattgtgcagcggctggcagaggacattcaattcgacgccgtctattatgataaatttggtgcgggagagttggtgcgggattatctcaacattcccggcatctcttcttcagcatccttcctgttcaatgaagaccgtctgaaaatactgccgctccatccggaatcgggcgtgccgtttcagccggacagggaatgtgaagagctgttggccgagatgaaagacaaatacggtgtcgcccctgacagcatggttcaatttatgaacaacacaggtgaattgaacgtcgtctatacaagcagatattttcagcccgaaagtgagacattcggagatgagtatttatttatcggtccgagttttccgaagagaaaagggcgcgtcgacttcccgattgactcattaaagaatgaaaaagtcatttatatctcaatgggaacggtgctcggggacacggaagcgtttttcaatctgtgcatagacgcgttctcagattttgaaggaaaagtagtcattgccgccggggaaaaagccgatctgtcgaaaatcaaacaggcgccggaaaactttatcatcgccccgtacgtgccgcagcttgaagtgctggagcaggccgacgtgtttgtcacgcatggcggaatgaacagtgtaaatgaaggcattcattatcaagtgccgctggtcgttattccgcatgataaagaccagccgatggttgcgcgccgcctgactgaattggatgcaggctgtacagtgcaaaaagatgaagtgagcgctgaaaaggtaaagcttgccgcggaagaagtgctgcataacggaaaatacaaacaaggcattcaagccattaatgaaagctttaaagaatgtatggacatgcaggatgttctggcccggatcgaccggtttattgaacaaaaacatgctcaataatacatggaaaaagcctgtttcctctgccaaagggaaacaggctttttataatggcttttagatgatgtgatgttcttcatttgcaagtttcacaagagtcagaagagattctgcctcacgtgcgttgagtgtttttgccagacggtctttttcaaagatctgctggccgaagacattcactgacgcctggtcaaccgccgtgtgccagttcttttgtgaatgattctcggaaaaagagaaaacaaacacggcaaagaccgctataagcatcgccatgacccaaaatttttgccgatttcctgctgctgacataggccgcctcctaacgttcattttactggtattagatcatatatgagctgtttttcatagagtaaagaagtcattatttcaggtagtccaaatgaaacggagcacagccgaaagcccgccggtcaggccgatgagccaattcatattttgttcatattttattaaaagtttatccaagcctgtcctttacagtggatataaccataaaacgctgctgaaaggggccttgaaaaatgcatattcatatgatcaacaaaaaccagtttgagagtgacttggaggcggccggcttcatccgtcaggcagatgatattatcggcaaaatgaaagaatacgtaacggaatacgcctcttcatccgaacggtttctgattgaaattcaaaccgtcatgaacgaatacaaagccgtcatctgtgcgatgttttcgactatggaaattgccggcgcaaaaaaagacgagaagcatgttgagttcgaagcctgcacagtgttgtgcgaataaaagaccttcattaaacctccgcggctgcctgaacggcagtttactgactggtgttccgggaagggaaaatattgaaacttctaaagcggctgttcgtataaaagagtaaatcagcttgtatatggaggttcgtgaaatgaacgataagaaaaaacaagcttttgaacagcttttcagcactttagacgaaagacatgaaataaacggagctgtattggcagcggaaaacggccgcatcttatatcagggttcattcggcgctgcagaactgaaaacaaagaggatgctgaatgaccaatcagtctttgaattggcctcagtatcgaagccgtttacagctttaggcgttatcattttagagcagcgagggaagctgcgttatgacgatatgatagagcggtggcttcctgattttccttatccgggcattaccattcggcatttactccatcatacgtcaggattgccggactatatggagttatttttaacacattgggaccgggacagaattgccgttaatcaagatgtgatcgatatgcttaagcagcataaaccggatgcttatttcccgccgggcaaggagtggctatacagtaatacggggtatgcggtgttagcggttattatagaaattgtatcaggcatgagttttgctgaatttatgaaacaagccgtatttcatccgcttcgtatgcacgatacgcggatttataacagaaggctgagtaaagaaaacattccaaactatgcatatggctatgtgtatgatgttcattccggagaatatgtgctgccggatgaacttgaggaaaccgattatgtcgtctttcttgacgggattcaaggtgacggaaccgttaactccactattagagatttatatctgtttgatcaggctctttataaggaagaaatcatcggcaaagagtctaaagatcaagcgtttacaccgggctattggaatgaagaagagcaattcggatacggatttggctggatgattcaaaacagcgcccaaaaagggaaggttatcagtcacgacggaggctggccgggttattcaactctgatgatccggtatattgaccagaacaaaacactgatttatctcagcaatatggaacaatcgtatcaatttgaacaagctgtgattgccgcggccgtaaacatcttatttgatcagccgtacgtgattccgaaacgtccggcggatcagaaaaaagcagatatcgatcctgcgatttacagcagatttaccggcaattactcatttcaggatgacacacatgcatcggtgacggtaaaagaaaaccgattgtatcttgcaatagacgggcagacaccatttgaattattcccaatgacggaaacccgttattttgtcagggcgctgccgcttgaaattgaatttgcaggtgataaagcacaaactgccccgcatttcgttttatatcaggacggcacagaagaaacggctttgcggatagactgactgacatgcaaaacaaaaccgccgtcctgagaagacggcggtaatagaaaagtcaaacccctttaatgacgcgaaattttcttttcggctctgacataaatatagaagaaaaaatcatagctccgaccattgtgatgtattccatataaagcgaaacttctgccaaaaccaaccccgcaatcattaaaacagcgcccaataccaccgcaaaaaccttcgttttcatgatgagttcccctattatctgataattaaattatactgcatctctattaatgtgtacattttgtgaacaatttcacctgataaaaggcaataaagagagagttgaagaattaggagaaatgacaggccatctttttgttttaccgaagaaacgaaagggaaaatgaaaaatcaaaaaggcaaaggagttcttgaaatgaaagcgagactatttttattcagcatgtttctcctgatccccgttctggcgcttgccggatgcaacggtcaatcttcaggaggaagcgaaaaagcgaaagacaaagaaacgcactctcacgaagacatgaatcactcaggttcatccgaggtgccgaaaggtttaaagaaagccgaaaatccgacttataaagtcggcagtgacgtcatgattttagcttctcatatgaaaggcatgaaaaatgcgcaaggaaccgtaaaaggtgcttatgatacaacggtttacagtgtatcttacactccggaaacgggaggaaagcgcgtcgaagatcacaaatgggtcattcaggaagagctgaagggcgccggtgataaaacgttaaaaccgggtgacaaggccgtgatcgaggcatcccatatgaaaggcatgaagggtgccgaagccgttattgattcagccaaaaagacaaccgtttatatggtcgactatacaccgactgacggcggccaaaaagtaaccaatcataaatgggtgacagaagacgagcttgctgccgcaaaataaaaagaccgccaaagccgaaggaactcctttggcttttttgcggtctcacatttatgcggattttcttttcaaggcaggtctcgttaaagagaatacagctaacgcgacagcgataatgacaatcaaaccgccgcaccaggctgttgctgtgacagaaccggtttgtccgatcacgccgccgccgatggctgacccgagcgcgatgccgatctgcaaagcggacgtgttgaagctttgctgaatatcggaagactcaggcgcaattttgattaaatagctttgctgcgccggcgcaaggctccagctgagcaatccccagatcaccatcgcaggcaggaaaatgattaaagaaaccgttgtcagcggaagaataaacaggatcagagcgaaagaaacggtcacaagcatgatgcttttaaatgctcctaaacggtcatacagccagcctccgaacgggccgccgcataccgctgacagaccgaacaaaaagtagcatacactgacccaaacggaactcaaatgaagcgttctttccaaaaaaggcgcaaagtaggcatagagtgtgtaatgccccgccaatgtaaacaaggtgacaaggtgtgcgctggcaattttggcggtcccgatcgtcttgatctgctcacgaaacggaatcattttttcagcaggtattttttcgaaaaagacgctgataatcagcatggaaatgagagataatacgccgattcccaagaacagaacacgccatccgaaggcattgctgatgataatgccgacaggcacgcctaaagcgattgcggagctgaaccccatgaaaatgatgccgatcgcccgcgctctgtattcaggcgccacgattttaggagcaatcgttaaagaaaggacgacaatcagccctgtgctcatggaagcgagcacccgtgacaccataagaacggcgaaattgggactgaaataagcgaccagattacttaggaagaaaataaacagtgcgattaaataaagccgctttcgttcagcctttgccgtcactgccaaaagcagcgggccggataccgcgtaaccgagcgcaaacacgctgatcagctgccccgcgctgacaatggatatatctaagtcggaagcgatttgcggaagaataccgcccacaattaattcaaccaatccgactgcgatggtagatgctgcaagcagaaatactttgaaattcatgtacagatactcctttttttattttttagaaaataaaaaatcctgattacaaaaagtgtacgggacaatttttgtaatcaggattttacggttcctggtagacaccctcaaaccatatcattgaggttatacaatatattgcaatattcggttgtgtccgtttctgcaaaaaattctaccataatagtgagggagattccatagaaaattcgaggaaatcctttcaatttcaatatcggcggctgtaacgtcattgatgaagcagggaaaaaaatttatgataaccgtaaggagtctatacagatcaaacattacacagccggaggaaaccgatgaataagtacgaaaaaatcgccaacgaaatgagaaagaggattaaaagcagtgtatatgacatagatcagccgatcccggatgaaaagacgctcgctgcggagttcgggtgcagccggatgacgatgaagcgggcgcttgatacacttgcggctgaagggatgcttttcagaaaaagagggcacggcacatttatcattcaatcagccatgcaggatgagcacgttcacgtagtcagcaacgaaattctcggcttgagcaatttgttaaaaggcaaaaatatcaagagcaaggtcatccggtttgaagtgcagtttccgtctcaagatgtcgccgcacatttggctatcgatgaaaagactcccgtctattatgtagtgaggctcagaatcgttgaaggcgaaccgtacgttcttgaaaaaacgtacatgccggcgagccttatacccggcattaatgacgaggtgctcaaccattccatctacgatcatattacgcggggattgcagctcaaaatcgcgggcacacacagaaaaatcagagcgtgcaagtcggatgatatggatcagcaatatctcggctgccggccggatgacccgatacttgaagtcgagcatgtaggctttttggacaacggcactccctttgaatattcattttcccgccaccgtcatgacaagtttgtcgtgacctcagtcaatataaaacgttcataaaagcgccgaagagtgagagaaaaactcactctttttttgttgccgctgatttacatcgtcgcttcttttatgttatattacccaatgatagaatcatcctacaaatttcagaggtgttttgatggagatatccaaaacaagcagactgtcgctcgtagaacaagtggtggcgcaaattgaatcgttaattcaatcggataaatggccggtcgggacgcgcattccccctgagctggatttaatgaagcaatttgatgtgagccgaaacacgttgcgtgaggccattcgggcgctcgtacatgccggcctgctgcagacaaggcaggggagcggtacgtatgtcagctcatccagtgttctcggcgcggcattttaccgccatattaaaaaatcaaatttgcttgaaacattagaagtcagatacgcactcgaaagagaagctgcacgattggcggcggaaaggcgtaatgacgaagacctgaaagcactgaaggcatgcttggatgaatgtgaagcggccttgcaaaatgaagatcgaaaacggtatgccgaagccgacattaagctgcacaaaacaattgtacaggcggcccataacaatatgctttctgatctatacgagcatatgacggaggcgctttgtgcgtcagtccataacctgttggaaatcacccctgctatccggatccacacccagcttgccgccgcgattatcggacagaaaccggatcaggccatggaggccgtcaaccaatacatcacagtatttaaagatacaatacacatggaggatgaacatgaaaattaaagacgaacatcaagttctgcaagcaagtcagcgtaaaaaactgatattgctggtcatcggagtcatattgataggggccaacctcagagcgcctctgacatcggtcggaccgctcgtttcctcaattcgggacagcctcggcatgaccaatgcggctgccggcaccattacgacagtgccgcttttggcctttgcatgtctgtcgccgtttgttcctttattgtcccggcgcttcgggaccgagattgtcttactgtcatcattaattgtcctgacagccggaactctgctgcgctccatcgccggaatcggcactctctttttcggaacgatcctgttgggattgtcgatcgccgtatgcaacgtcctgctgccgagtctcattaaacataagtttcccggaaatttaggcatcatgaccggcgtctactcggtttctatgaatctgtgcggcgcgattgcatccggcatcagcgtgccgatcgcctcttcagcgggggtaggctggaaaggcgcgctcggctgctgggctatcctttcttttattgcgttcgtcatgtggattccgcaaatgcgaggacgcgaactgcccgtccgcacgactgggacaaacggagagaaaaaaaacagtctgatgcggtctccgctggcttggaaggtaacgatgttcatggggctgcaatcccttattttttacaccgtcatcgcttggctgccggaaattcttcagcagaatggactcagctcaagtaaggcgggatggatgctttcattaatgcaattctcagtcctgccgattacttttatcgtgccgatcgctgccgctaaaatgaaaaatcagcgcgcactcgccggactgacggctttatttttccttatcggcattgccggcgttcttttcggaagcccggctctcactccgctatgggtcattttgatcggaattgcgggaggctgtgcgttcagtctggcgatgatgttcttcagcctgcggacccggcatgttcatgaagccgcggcgctttccggcatggcccagtcattcggatacctgcttgccgcgttcgggccgcttgtattcggtttgctgcatgacatcacgcacggctggacggttccgttattcatgctgatcgcagtctctgttctgattttcattttcggagtcggagcgggaaaagcggaacagatcaaaacagcataaaaaaacaaaggacccgtttagggtcctttgttttttatttaaaaagctgtctcaggccgttacgctgtcagttttaagccgatgacaccgatgaggataagccccagagacaccaattgtgacagattgaatttttctttaaaccaaagtatgcctacggccgaaacgccgatgcttcccatgccggtccaagccgcatacgcgacacctgtgggaagaacctgcatcgctccggaaaggcaaaagaatgaaagcataaagcctgttaccatgacaatcagcggccacttttttttaaaaccgtcaatatgtttcatggcaacggccgctacaacttcctccgctccggcaataaataacagcagccatgccattaatgttcaccccttgtttcagtttctttcgtaaataccttcattcctaaaatgccggacaacagcaaagccaaaaagaatatttgtccgattgaaaacgattcgcctaaaatgacgcccgttacatatgtgccgacggtgcctattccgacaaaaacggtatatgcggcagccatcggaatttttttataagagcggatcagcatcagaaagctgacggcaatcaaaaggaaaataccaatccaatcaaagagcgaatccgcatgcttcagggcggacgcccaaactacttctaacaatccggctatcaatacaagcagccaatacatgatacagtcacctcagttatgaatgaatgtcagtcatttttacggcggtcaaaaatgatcggtctccgccaatcatttctgcaagcttcttttgagaaagctgaatatttcttttttatatacttcgagatcgacatcctgttcacagccgatataaaaccgttcagccgcgttctcgacaacgttgataatcgttctggccgtccatctgacatgaatgccgctgatgacctcaccctgttcaatggccgtattgatcatgccttccagccaggaataataaggctgataaatggcttcccatttctccattgaatgatcgatggcaagaccggaataacagagaacgataatatctttatgaagccgggtgatgtgaaatgtctcatctaccaaaatgtccagcaacgtccaaaaatcttcagaaccgtccgttttcccttttattctgtccagcgtagtgtcgagcaggttttctgcaatcgcggatatcagtgcgtttttagaagaaaaatataagtaaaacgtaccttgggccgttccggcttttttgacgatttctgaaatggatgctttgtctaatcctttttcagaaatgacttcaatcgcggcttgcaggatcttttcgtattttcccgagctttgttttgccaatagaggggttcctccttttatgaatgactgtcattcattttatcgcatgttcgcttttttgtcatcccttaacataaaaataccggaaagaagaccatacttctttccggcattcgtcatttatcactgtcgatcatagccttcggcagacctgtatattttgcccagtaataaataccgagcgaaccgatggcgatcagaatcaggtcaagcggattgctgataatgcccaatccgtggccgaacgagccgagataggagaaaatcagcatcatgacataaaagccgacgatccaccatgctgatttcagctgctggcgtatgctgacatcatctttgggagcatatttactgaaacagagatagatcagaaacatgacaatttgagaaccgagaagccaggatacggtgcgccatccggaccaatatacaatataagaggtaaaaataaacgacagcggcccgatgatgctcatcccttttaaataaaacggtctgttaatgttctttgcgttgactctcagcgccgcagaagaaatcggcgcaatcgcataagacagaatcaatgcgacggagcatacgttaacaagagcgttccaagaagggaacggaagcgtccaaaaaacagccagaccgaacgaaagccaaagggaggcacgcggtgtcccggtttctttattgactttagaaaaaatgctgaataatgttccgtttctggcccaggcatagacgagacgtgaagtcgtattcataaagatatttccgttaccgcccggtgataaaatcgcatctaaaatgaccaatgtcgccagccaccccaaaccgagcaagacggcgatatctttgaacggaagggagaattcagtcccgatagccggccatccgtgcttcagggtatccccgggatcgccccgataaaagtgagctgcagcacggtataaataatagtagaaacgataatacaaacaatcaatgcaatcggaatgttccgcttcggattctgcacttcactcgcgacagccacaatcggatgcagcccaaggtatgcaaacatgacgccgcctgtggaaatcgcggcctgaattccggtgaaaccaaaaggcgcgaatccgtgaacggtcatattgcccgggtgaaaatgaaaaatcagtacaacaattaccgtaatcggtacgacatatttaaaaatcgaaataatgaagtttgctttcgcaaaggttttgacactccagtaattgaggaggaagaacaggcagagcagcgcaaattgcaatatccatccggcaattgtcggagaatcagagccttttacggtcaaaccgggaaaccaatacgccacgtattggcggaccgccgttacttctatagaaataagactcgtgtatgccacaatggtgacaaaggaaattaaatatccgaccaggtgtccgtgtgaatatacgggataccggataattcccccggtccgcggcagcgcggcgcccagttccgcataaaccaagccgatcaataagatgattcccccgccgatcagccaggaaaaaacgcctgacgggcccgctttagaggcgacgttactgacggcaaacagccatgccgaaccgaatatggctcccatgccgattaaaataagatcaaaaagtgacatagttttctggaagtttccttgcttagacattcgctgcctccttaaaaaagacattgttctctttacataattcccattatcattcaaacatacccagccggccggctggaaaattaggacaactttcgaaacgaagtatgtacagaaatgtgctcacatcaaaatcacggccgtatggcaagatctcccggcttatattccccgttttgaacacattcaaacctcatattcagaaaaacaaaaaacgcccgaaacaggcgttttttgttacaagttcatatctttcagtccggggctgtgctcattcggaagctcgggaagttccggcacggggaaacctttaggaggctctgacacacttaattcgccgccgtttcggctcggcgtcgttccctgcagaatttctccgatccgtgtcggatccagtctgaaattaaattgggtattatgataacccatttcaacgaatttccggcattccgggtatttttcaatatcataattcggcacgggaaataatttgccccattcgacacccagtgtttccagcgcttttgtaaatgcattttgatgggcgttgtcacggacgatcagaaaaccgagtgtttctctgaacgtctggtttgagctcatttcataaatgcgcgtcttttgcagcacgccggttgattccagcacgacattgtccaatagatcggaaatcagattcccgtggttgtatacccaagacccgttccatggattgccgcttgcatcggcaggaagagaactttgcgccccgataatataatggtgcggattggcgtgtttaaccgcttcgtctagcggcgcctgatctgctgcctgatttccggcgccctcagcgccgctttcatccagcagcgcattaatcgtatgctggacgagctcaacgtgtgcaatttcttctaaaaatacgccgcgaagcaggtcgcggaactgcttttcttttcctctgaaattagagctttggaaaaagtattgcatcatcgtccgcatttccccgtaatgcccgcctaaaatttcctgaagcaccttggccgcggccgggtccggcttgtccggtttaatgatattgatcagctcttctttgtaataatacataaacagcgcccctgaaagaagttttcggttcttctgttagtgtctttgcaaagtcagtttttatgtatcggcatcaaaaaaaggacggaaagcgtgtccgtccttttgtgttaagcctcaaccgccccgcgaagtttcgtgttgacaagcccgttccatccttgatccatcgtactgtgaatctcggagcttttccgattgactttattgatgacggcttccggctctttccatccgccgtgaatgagagtgaattccgtatctccgctttccgtttcctttaagacaaaagagacgatccagccttccgtatcccacgaaaaagaaaggcggtacggcgcttcaatatccagcagcttgcacggagacggaccgaacggagattccagctgaaactcactgtcttcttgaggcgtgaaatcattcggcataaaccagagagacaggccgtccgccgtagagaccgtatcccagacaacttgtatcggcgccttgaaaacggcggtatgaataatgtccggtaatggctgattgctgttgttgtttttgttatctttgttttgtttatcagacatgatgcgtaaccactctttcgctgtttttacttttgatcatactacacagggcaggacatttgaaaacaaatcaaacttattttatgcttttccaaagccattcaattcattttaaggagacgtagtgatgacagatcaatttaaagcgttagtagtcgatcagcgtgaagaccggttttcagtcagcgtacgggagctggcggttcaggaccttcccgagggtgaagtgctgattaaggtttgctactcaggggtgaattataaagacagcttggctgccattcctgacggcaagatcgtaacctcgtatcctttcgtgccgggaattgatttagcgggaatcgtcgtttcttcagatgacgcccgttttaaagaaggggacaaagtcattgcgacaagctacggcataggcgtttcccattttggcggctatagcgggctggcccgcattccggcagattggatcgtgccgctgcctgaaggtctgacacttaaagaagccatgacgatcggaaccgccggcttcactgccgcattgtccgtccagcgtcttgaagaaaaccatgccgctcctgaaaaaggaaaggtgctggtgacgggagcgacagggggcgtcggaagctttgccgtctccattctttcaaccttaggttatgaggtcgaggccagtacgggaaaagaagaagaaagcgggtatttgaagagcctcggagcaaagacggtcattcaccgcgacgaagtgtataacggcacgttaaaaccaatgcaaaaacaaaaatgggcagcggccgtcgatccggtcggaggtgagccgcttgcttcagttctcagtcagattcagtacggcggatcagttgctgtgagcggactgacagcgggaacgaaactcccggctacagtctttccgtttatattgcgcggcgtcagtctcttgggaattgattccgtattctgtccgatggagacaagaaagaaaacatggcagcgtttagctgatgacttcaagcctgcagatctggaggcctttattcaaaaggaaattacacttgaagagctgccggatacgcttcctgcccttttaaaaggagaagcgagagggagaacgattgttacaataaacgaagaataaaacaaaaacccccaatcagcagttgggggttttcaatatgtaatcaattattgattataataggggtaattaattgagtatattatggaaataaattgatataaaacgaaaattgattatatataggtgatataaaggtgagttataaaattttctgaaatatttattgactgaaagcgcttttaaaattatgatattaacataagtaccaataatatcattataacttcactacaaagtaactataaaataacaatatgacgagagggggagagcgaataatcactataaatgataacgctttcggaacattttcttcttatataactgttttggacggtcagaccttgtatgcagacgttagaggtgtaaatattgataactgaatattccgatattatctctgtgtaaaaactaggaggatttgaagatgaataaaaatagcagccagcattcatttttgagaaccatcattttagtatcgacattcggggggcttcttttcggctacgataccggtgtgattaatggggcgctgccgtttatggcggaagctgaccagcttaatcttaccgctttgactgaagggatggtggcgagctccctgctcttgggcgctgcgatcggcgcggttttcggagggagattgtcggactataacggcagacgtaaaaatatccttatccttgccgttttgttctttatagcgacgcttggatgtacactggcgcctaacgtatcggttatgatcatctcccgttttctgctggggcttgccgtcgggggagcatccgtaaccgttccggcatatttggctgaaatgtcgccggcggaaagccgagggagaatggttacccaaaatgaattgatgattgtaacgggccagctgcttgccttcacgtgtaatgctatcatcggcaatgtgcttggtgatacctctcacgcttggcgttatatgctcgttatcgcggcccttccggcggtattcttgtttttcggtatgctgaaagttcctgaaagtccgcgctggctggtttctaaaggaagaaaagaagatgctttgcacgttctccggcgaataaggaatgaagagaaagcgaagtctgagctcgctgagattgaatctgcctttcataaggaagctcagatggagcaggcgacctttaaggatcttgccgttccgtgggtgcgccgcattgtgtttatcgggatcggaattgcggtagtgcagcagctcaccggcgtgaattcaattatgtattatggaactcaaattttaaaagatgccggttttgagacaaaagccgcattaatcggcaatatcgctaacggtgtgatttcggtgctcgcgacttttgtgggaatatggcttctcggcaaagtcggccgccgcccgatgctgatgacggggctgatcggaacgactgcggtgctgcttttgatcggagttctgtctgtcgtgctgaaaggatcgcctgctcttccttatgtggttctttcattaacagtcactttccttgcgtttcagcagggggctgtctctccggtgacctggctgatgctgtcggagatattcccgctgcgattgcgggggcttggtatgggggtgactgtcttctgcctctggatcgtgaacttcattgttggtttaacttttccggtcatgctcgcaaacatcggattgtctgcaaccttcttcatttttgtcctgttagggatagcgtccgttatatttgtgaaaaggttccttccggaaacgaaaggtctttcgctcgaacagcttgaacaaaacttccgtacctatgaaaaaacagatcgtaatagcgcagaagccgaggtgagcgggtaatctgaatagacgcggggttcctgggaatcctgctttttatttattatatagaagggaataataagcggaaaaaaagtttcgtaaaagtgttgacctaatttaaagtgcgtggtatattattaaacgtcgctgatgaacaaagcgataacgacaaatgagaaaatgatctttttaaaaaagactttacaaattctcgaaagcgtgtataataaatgaggtcgagaaaaaagacttcgaaaagaaataaaataacacttgacatcataactgattggtagtatgatagttaagtcgcctgataagcgcccgtagctcaattggatagagcgtttgactacggatcaaaaggttaggggttcgactcctctcgggcgcgccaattcaaatgcgggtgtagtttagtggtaaaacctcagccttccaagctgatgtcgtgagttcgattctcatcacccgctccattataatgatctttgaaaactaaacaagacaaaacgtacctgttaattcaaagttttaaataaatcgcacagcgatgtgcgtagtcagtcaaactactttatcggagagtttgatcctggctcaggacgaacgctggcggcgtgcctaatacatgcaagtcgagcggacagatgggagcttgctccctgatgttagcggcggacgggtgagtaacacgtgggtaacctgcctgtaagactgggataactccgggaaaccggggctaataccggatggttgtctgaaccgcatggttcagacataaaaggtggcttcggctaccacttacagatggacccgcggcgcattagctagttggtgaggtaacggctcaccaaggcgacgatgcgtagccgacctgagagggtgatcggccacactgggactgagacacggcccagactcctacgggaggcagcagtagggaatcttccgcaatggacgaaagtctgacggagcaacgccgcgtgagtgatgaaggttttcggatcgtaaagctctgttgttagggaagaacaagtgccgttcaaatagggcggcaccttgacggtacctaaccagaaagccacggctaactacgtgccagcagccgcggtaatacgtaggtggcaagcgttgtccggaat

SEQ ID NO: 2 - DNA, 1000000 bp, Bacillus amyloliquefaciens
tattgggcgtaaagggctcgcaggcggtttcttaagtctgatgtgaaagcccccggctcaaccggggagggtcattggaaactggggaacttgagtgcagaagaggagagtggaattccacgtgtagcggtgaaatgcgtagagatgtggaggaacaccagtggcgaaggcgactctctggtctgtaactgacgctgaggagcgaaagcgtggggagcgaacaggattagataccctggtagtccacgccgtaaacgatgagtgctaagtgttagggggtttccgccccttagtgctgcagctaacgcattaagcactccgcctggggagtacggtcgcaagactgaaactcaaaggaattgacgggggcccgcacaagcggtggagcatgtggtttaattcgaagcaacgcgaagaaccttaccaggtcttgacatcctctgacaatcctagagataggacgtccccttcggggcagagtgacaggtggtgcatggttgtcgtcagctcgtgtcgtgagatgttgggttaagtcccgcaacgagcgcaacccttgatcttagttgccagcattcagttgggcactctaaggtgactgccggtgacaaaccggaggaaggtggggatgacgtcaaatcatcatgccccttatgacctgggctacacacgtgctacaatggacagaacaaagggcagcgaaaccgcgaggttaagccaatcccacaaatctgttctcagttcggatcgcagtctgcaactcgactgcgtgaagctggaatcgctagtaatcgcggatcagcatgccgcggtgaatacgttcccgggccttgtacacaccgcccgtcacaccacgagagtttgtaacacccgaagtcggtgaggtaacctttatggagccagccgccgaaggtgggacagatgattggggtgaagtcgtaacaaggtagccgtatcggaaggtgcggctggatcacctcctttctaaggattttaacggaatataagaccttgggtcttataaacagaacgttccctgtcttgtttagttttgaaggatcattcgattcttcgagatattgttctttgaaaactagataacagaagtaattcacattcaattagtaatgcaagatatcacgtagtgattctttttaacggttaagttagaaagggcgcacggtggatgccttggcactaggagccgatgaaggacgggacgaacaccgatatgcttcggggagctgtaagcaagctttgatccggagatttccgaatggggaaacccaccactcgtaatggagtggtatccatatctgaatacataggatatgagaaggcagacccggggaactgaaacatctaagtacccggaggaagagaaagcaaatgcgattccctgagtagcggcgagcgaaacgggaccagcccaaaccaagaggcttgcctcttggggttgtaggacactctgtacggagttacaaaggaacgaggtagatgaagaggtctggaaaggcccgccataggaggtaacagccctgtagtcaaaacttcgttctctcctgagtggatcctgagtacggcggaacacgtgaaattccgtcggaatccgggaggaccatctcccaaggctaaatactccctagtgaccgatagtgaaccagtaccgtgagggaaaggtgaaaagcaccccggaaggggagtgaaagagatcctgaaaccgtgtgcctacaagtagtcagagcccgttaacgggtgatggcgtgccttttgtagaatgaaccggcgagttacgatcccgtgcaaggttaagcagaagatgcggagccgcagcgaaagcgagtctgaatagggcgaattgagtacgtggtcgtagacccgaaaccaggtgatctacccatgtccagggtgaagttcaggtaacactgaatggaggcccgaacccacgcacgttgaaaagtgcggggatgaggtgtgggtaggggtgaaatgccaatcgaacctggagatagctggttctctccgaaatagctttagggctagcctcaaggtaagagtctcggaggtagagcactgattggactaggggcccctaccgggttaccgaattcagtcaaactccgaatgccgatgacttatccttgggagtcagactgcgagtgataagatccgtagtcgaaagggaaacagcccagaccgccagctaaggtcccaaagtatacgttaagtggaaaaggatgtggagttgcttagacaaccaggatgttggcttagaagcagccaccatttaaagagtgcgtaatagctcactggtcgagtgactctgcgccgaaaatgtaccggggctaaacgtatcaccgaagctgcggactgttcttcgaacagtggtaggagagcgttctaagggctgtgaagcaagaccggaaggacttgtggagcgcttagaagtgagaatgccggtatgagtagcgaaagaggggtgagaatcccctccaccgaatgcctaaggtttcctgaggaaggctcgtccgctcagggttagtcgggacctaagccgaggccgaaaggcgtaggcgatggataacaggttgatattcctgtaccacctcctcaccatttgagcaatgggggacgcaggaggatagggtaagcgcggtattggatatccgcgtccaagcagttaggctgggaaataggcaaatccgtttcccgtgaaggctgagctgtgatggcgagcgaattatagtagcgaagttcctgattccacactgccaagaaaagcctctagcgaggtgagaggtgcccgtaccgcaaaccgacacaggtaggcgaggagagaatcctaaggtgatcgagagaactctcgttaaggaactcggcaaaatgaccccgtaacttcgggagaaggggtgctctgttagggtgcaagcccgagagagccgcagtgaataggcccaggcgactgtttagcaaaaacacaggtctctgcgaagccgtaaggcgaagtataggggctgacgcctgcccggtgctggaaggttaagaggagcgcttagcgtaagcgaaggtgcgaattgaagccccagtaaacggcggccgtaactataacggtcctaaggtagcgaaattccttgtcgggtaagttccgacccgcacgaaaggcgcaacgatctgggcactgtctcaacgagagactcggtgaaattatagtacctgtgaagatgcaggttacccgcgacaggacggaaagaccccgtggagctttactgcagcctgatattgaatgttggtacagcttgtacaggataggtaggagccttggaaaccggagcgccagcttcggtggaggcatcggtgggatactaccctggctgtattgaccttctaacccgccgcccttatcgggcggggagacagtgtcaggtgggcagtttgactggggcggtcgcctcctaaaaggtaacggaggcgcccaaaggttccctcagaatggttggaaatcattcgcagagtgtaaaggcacaagggagcttgactgcgagacctacaagtcgagcagggacgaaagtcgggcttagtgatccggtggttccgcatggaagggccatcgctcaacggataaaagctaccccggggataacaggcttatctcccccaagagtccacatcgacggggaggtttggcacctcgatgtcggctcatcgcatcctggggctgtagtcggtcccaagggttgggctgttcgcccattaaagcggtacgcgagctgggttcagaacgtcgtgagacagttcggtccctatccgtcgcgggcgcaggaaatttgagaggagctgtccttagtacgagaggaccgggatggacgcaccgctggtgtaccagttgttctgccaagggcatcgctgggtagctatgtgcggacgggataagtgctgaaagcatctaagcatgaagccccctcaagatgagatttcccattccgcaaggaagtaagatccctgaaagatgatcaggttgataggtctgaggtggaagtgtggcgacacatggagctgacagatactaatcgatcgaggacttaaccaatttgaatgtatgcttactgttatctagttttgagagaacactctcaatggtttggtggcgatagcgaagaggtcacacccgttcccatgccgaacacggaagttaagctcttcagcgccgatggtagtcggggtttccccctgtgagagtaggacgccgccaagcttttctaaaattttatcatcgcggggtggagcagttcggtagctcgtcgggctcataacccgaaggtcgcaggttcaaatcctgcccccgcaaccaaaaattaaatggtccggtagttcagttggttagaatgcctgcctgtcacgcaggaggtcgcgggttcgagtcccgtccggaccgccatttttattgtaaacgaaacgatcatgttttcgttttttttgtgttttcttttaatgctggcagcttggtatctaaccaagctttcttttatatcgttaaagtcttggatattgaaacataatccgatacactagaaagagctgtatttcacaagagcgtcagaaaggaagacgggagatatatggatgagtttgatttgattcacagtattacaccgcattcgcattatcatccttccgtcgatgtagggatcggtgatgatggtgcggtttatacagcgtcaccccacatgcagcaaattgtctgccttgatacaatggtggagaatgtccattttaaattagagtattcctctcctcatgatatcggttataaggcgcttgctgttaacattagtgacgtggcggcgatgggaggcattccgaagttttatttggtgtctctagcggttccttcttgctggcagaaagctgacgtccaggcaatgtatgaaggaatggcggaactggcgaaactatatcaaatggatttgatcgggggagataccgtctccgcttccggtcaagccgtaattaccgttactgtcatcggagaagttgagaaggattgcgcttgtctgcgaagctcggcaagacccggggatgttgtgtttgttacgggggatatcggctcgtccgcagcaggactgtctcttttgttgggagaaacacatccttctgcttttcatacgagtgattattttatccaaaaacataaacggcccgttccgagagttcaagtcggccgcttctgctctcagcttcagcgcgcggctctgaatgatatcagtgacggattggccagtgagctgcatgaaatagctgcggcaagttcagttacgatagaaattgaagaacaacttctgccggtgcatccggatttgcctgaggcagattctgagtggaagaaatgggtgttattcggcggtgaagattttgaattggttggaacggtttctcagcaagagtggacctctctgcttgattactgcactcaatcgggcattccgattgcgaagataggggcggtatctgaacggaaggaagcatgtgttcttttgacagccaatgatcagagacaaatcgtccttgagaaaaaaggatacaatcattttaaataagacgggtgactcactttgaagacattacaatggagaacgaaaaaccccgaagaaacgaaagccgtagccaagcttgccgcttctttggcaaagccgggagacattttgacactggaaggcgacttaggcgcgggaaaaacgacttttacaaagggttttgccgaaggactgggaatcacgagagtggtaaacagcccgacttttacaattataaaagaataccatgacggttcgattcctctatatcatatggacgtgtatcgtatggaggatgaaagcgaagacttagggcttgaagaatattttgagggacaaggcgtctgtttaattgaatgggctcatttaattcaggatcagctgcctgctgaacggctgcagatcgtcatcaagagagccggtgatgaggcaagggacattacctttacggcttgcggaacacggtatgaaacgctttgtgaggagataaataaacatgacaatactggcaattgatacgtcaaattacacgctgggtgccgcgctcgttcgagagaaaacggtgatggcggagtatattacatatttaaaaaagaatcattccgtgcgggcgatgcctgctgtcaattcattgctgaaggattgcggcctaacaccgcaggaccttacgaaaatagcggtggcgaaaggacctggatcgtacacaggtgtcagaatcggtgtgacgctggcaaaaacattggcatggtcgctgaagcttccggtttccgctgtctcgagcctggaggtgctggcggctaacggacggcactttcaaggactgatctgcccgttatttgatgcccggcgcggacaggtatatacgggactttatgaatatcaggacggccgcttacaatccgttcttcctgatcagaatgtgcttttgactgattggctcgacatgctgaaagaaaaagcgtctccggttttatttttagggcatgatacagccattcatgaagaaaccattctgcatgggctgacaaatcaagcagtgataggaacggctgcacagcataatccgcggccgtcagagctggcgtttttaggcttggaaaaagaagaagcggatgtccacagccttgttccggattatttgcgtctggcagaggctgaagcgaaatggatggaatctcaaaaatagggtgatagggatgaaaacgaaaacggcgattcgaagcatgcggccggaagatattgatcaaatttatgaaattgaaacagcatcctttacttctccgtggacgaaggattcattttatcatgagcttttggaaaatccgtatgcccactaccttgtcattgaaaaggacggctgtctggcggggtattgcggaatctggattattatagatgacgcgcagattacgaacatagccattaagccggaatatcggggccaatcgttgggagaagcgctgtttcgctctgcgatagaattgtgcagagaaaaaaaggcaagaaggctctctctcgaagtcagggtctcaaatcatcccgcccaatccttatataagaaattcggtcttcaggccggaggaatcagaaaacaatactatacagataacggggaagatgcgttattaatgtgggtgacattacatgagtgaaaaacaagatatttatgtattaggaatcgaaacaagctgtgatgaaactgcggcctcagtcgtaaaaaacggaaaagacatcatttcaaacgttgtcgcttctcaaattgaaagccataaacgtttcggcggggtcgtgcctgaaatagcgtccagacatcatgtggagcagattacccttgtgattgaggaagctctttcaaaggcggagatgggctttgatgatcttgatgcgattgccgtaacggaaggacccggacttgtcggagccctgttaatcggggtcaatgcggcaaaggcgttaagctttgcccatcaaataccgttagtcggcgtccatcacattgcgggccatatttatgcaaacaggctgataggagagcttcagttcccggcgcttgctttggttgtgtcaggcggacatacggaattggtttatatgaaagaacacggttcattcgaggttatcggtgaaacgctggatgatgccgcaggcgaagcttacgacaaagtggcaagaacgatggggcttccttatccgggagggccgcagattgataagctggctgctgcgggaacggattccattccgcttccgcgtgcgtggctggaagaagggtcttacaatttcagcttcagcggcctgaaatcagccgtgattaacacgcttcataacgcctcgcaaaaaaatgaggtgattcctccggaggatcttgccgcaagctttcagcagagtgtcattgatgtactgacggcaaaaacctctaaggccgcgaaagaatacagggttaaacaagtgctgcttgcagggggcgtagccgctaacaaagggttgagagccgcactgcagcaggaattcagccattcgggagatcccgagcttgtcatcccgccgctttctttatgcacggacaatgcagcgatgattgcggctgccggaaccgttgcttttgaaaaggggatccggggctcgtacgatatgaacggacagcccggtttggaattaacatcctttgatcgtctcacgttgtaaaacgtgaggcttttttttacttattaacagataattctaacatatccacaggattgtgaatatattcagaaatccagtctggataagggactgaaagttgttagtaaagtggataaagtcagaaaattttgtggatagtgtgtataaaacgcttacttaaatggctgacaaggaggatagctgtggataaaaaagcaccccttaaagaggtgcttgactttttctattcttctgaggagagttcctcccattctgctaataagttttcgagcttttgattctgggcttcattctccgcgtgaatggtctgtactttttcatgatcctgatacacgtcaggatcgcacagcagctcctcattggcactgattttctcttcggcggatgagacggccgcttcgatttcttcaatgcgtctcaggcgctgccgttctttcttcttccattctttttcttcctcgtaagttcttttcgtatcctgtttgaccttgccggcaggctgagtctgctccttttcctgccgcttcatttcttccagttccagctgctgtgcttttttctcggtgtaataatcatagtctcccaaatattcttctgcatgatcaggtgacagctccagcactcttgtggcgatcctgttaataaagtagcggtcatgcgatacaaataacagtgttcccgggtagtcgatcagggcgttttccagcacctctttactgtccaggtcaaggtggtttgtcggctcatcaaggatgagaaagtttgctttttgaagcatcagcttggcaagcgcgactcttgctttctccccgccgcttaacgaacggaccggtttcaggacatcgtctccgctgaacagaaagttgccgaggcatgttctgatttctttttccggcatgtccggatattcatcccacagctcgtccagcacgcgtttggacgatgtcagttcagcctgctcctgatcgtaatagccgattgtgacattggaaccgtacgtgatcgacccggattccggactgattgtattcataatcgttttcagcaaggttgatttgccgattccgttcggtccgacgagggcggcgctttcgcctcttgtaatgccgaaggtcaggtttttcaagagcggcggctggccgtcatagctgatggaaagatcctgtacgcgcaggacgtcgtttccgctctgttttgtaatgtcaaaacggaaggcggcggatttctcatccccgagcggctttgccatgacgtccatccgttcaagctgttttcgtctgctttgggctcttttcgttgtagaagctctggccagattgcggtcgacaaaatcttgaagcttggcgatttcgtcctgctgtttttcatacagcttcaggtctttctcatactgctcagctttttgttctaaataggcgctgtagttgccgaggtattttttgctttctgtccgtgagacctcgtacacttggctgacgactttatcaagaaagtatctgtcgtgggaaacgatcaggattgcgcctgaatatccctgtaaataatgctcaagccatgtaagcgtatcgatgtcgagatggttcgtcggttcatccagaataagcagatcaggctgggtcagcagcagttttccgagcgcaagccttgttttctgaccgccgctcaggctttgcactttcacggaatcgtcaaattttccgaagccgagtccgtgaaggatagatcggacgtccgcttcatattgatagccgcctttatccttgaaatcctgctgaagcctgtcataggttttcatcagcgtttcaagctccgcgggggcggccgtggccatcttttcttcaatagagcgcatctctttttccattgctttcaggaaatcaaaaacgctcagcagttcttcttttatggtaagctgggattccaagcctgtgtgctgggcaagatatcccatcgttaattctttcggtttgattaattcacccttttcatatgaaaggtgacctgcgataattttaaggagagttgatttgccggctccgtttctgcctactatggcgatgcgatcccgagatctgacttcaagctttatattgtttaaaataggatcagcgccaaaagatttggatagctgattaatttgtaagatcatcatattatttcacctctgttataataagttaagtgtagcttatcaacctgctgtcagcaaacaatacatcagaattggaacattataggataagacatcagggagaaaatagtgtatgatcagaagtaaggagagtttaaatatgaatggattttctcattttaatgaagaaggccgtgcccgcatggtggatataagcgataaatcttcaacagtccgtactgccgctgcgatatccagcgtacacatgaagcatgacgtgtacagcagaatcaaaaaccgcgagatcggaaaaggagacgtgctggctgtcgcacaggtggcaggaattatggccgcaaagcagacgtcagcgattatcccgatgtgccacccgctttctttaagcagcgtcgacatttcattcggctgggaggaaaaggattccgaagccgttcttcatatacaggcaagcgtaaaaacgaaagggagtacaggtgtggaaatggaagcgctaacttccgcttcagtctgcgctttgaccgtgtatgacatgtgcaaggcgctggataaaggaatggtcatcggcccgacctgcctcatggaaaaaacaggaggcaaaaacggtgattttaaaagagatgcatctgagtataaagtggaggaccaatcatgaacaaggatcaatcaaaaattccacaggcgacggcaaaacggctgccgctttattatcgctttttaaagaatttacacgcgtcaggaaagcagcgcgtttcatcggctgaactgagcgatgcggtaaaagtcgattcggccacgatccgccgggatttttcctatttcggggcgctcggcaaaaaaggatacggctataatgtggattacctgctgtcatttttcagaaaaacactggatcaggatgaaacgacgaacgtcattttgatcggtgtcggaaatttagggacggcgtttcttcactataatttcacaaaaaataataacacaaaaatatctatggcttttgatgtgaatcagagtaaaataggaactgaggtaggcggtgtgcctgtctttgatcttaatgatttagagcttcacataaaggatgaacccgtggcgattcttaccgttccggcggttgccgcccagtcaatcaccgaccggctcgtgtcactcggaatcaagggaatccttaactttacgccggcccgtttgaatgtgccggatcacattcgaattcatcatatagatttagcagtagagcttcaatcattggtttatttcttaaagcattattctgttttggaagaaattgaatagcgaaaggaggagctgcacatgatcggtcctggaagcctggcggttatcggtgtggtggcggtgattattttcggtccgaagaagcttcccgaattaggaaaagcggcgggggacacgcttcgtgaatttaagaacgctactaagggattagccggtgaagaagaggaaaaaaagaaagaagaacagtaagataggatgacgcgtatgagagtgaatcaaatgacgcttgtggagcatattgccgaacttcggaaacgattgctgattgtggcgttatcctttacggttttctttattgccggcttttttctggcaaaacctatcattgtgtatcttcaaaaagccgatgaagtaaaagagctcacccttaatgcttttaacctgacggatccgctgtttatctttttgcagttcgcgtttatcatcggcatcattttgacttcgccgattattctctatcagatttgggcgtttgtcagcccgggtctgtatgagaaggagcgcaaagtaacactcagctatattccgatttcgatcgtgctgtttgtcggcggtgtgtcgttttcttattatattttatttccgctggtcgttgattttatgaagcgggtctcgaatgacctggatgtcaaccaggtaatcgggattaccgagtactttcattttctgctgcagctgacgattccgttcgggctgctgtttcagatgccggtgctgatcatgtttttaacgagactcggtgttatcacgccgaggtttttatcgaagatcaggaagtacgcatattttgtgctgctcgtgatcgccgcgatgattgcgccgcctgagctgctgtctcacttgatgattaccattccgctttgcattttatacgagatcagtatcctgatttcaaaagcggcgtatcggaaaaggcagaccggcagtgaatctgaccaggacgtatcagcataaaaaaagccatttctcaatgatgagaaatggcttttcttttattatttttggtttttcttcactttaaatgagaaggcgaacattttaaacgagatgctgatattataagcggcgaaaaccatcagcagtatggaataaaaagaccacatgcttcccggagagcttgcggccaaatacgtaaagatacagccgactgcgaaataaatcaagccccaagtcattgggttcctcatacaaacaatcctccaataattaattgcatttgctcactatgctgttcaatatatttttgggcggggccgagctgcatgaccacgacaatggtattcatcatgacatgggcgaatatcggcacaataatccgtttcgtctgcacatacaagaacgcaaaggtaaagcccatggccgtatacagcagcaggtgcgtgaggtcttgatgcacaatgccgaaaatgacggaactgatcagtccggcgataaagaaattcgttttttcatataatacaccgaagatgatcttccggaaaatgatttcttcaagaatcggcccgacgatagaagaaacgataatcatgagcggcatggctttaataatgttaagaatggctttcgtgttttcggaaccgctgcccacatgaaagacatactgctcaatcatcccggcgattccctgagaaaataaagcgagccatattcccgcgaccgcccagagaacggacatgccggcggatgctttcttcccgtttcttaatgtctgtttcggcgcggttctcaaaatcaagagaacgataatcaggcagataaaaaagcttacgacggaataaatcccctgagccatggtgagattcgcattcgtagggtgcccgcccgcatagccgaatttgtacattaaaggaatgccgatcaatgcggaaagctgcatgataacatatgtcaaaatgatataccaatactgttttctcaaatgatatgtactcctttatcctataaaatcaacttatttgttcttattgtaacacaagtgaacttgacgtgaaaaaaggagaaaatcagtgcgagagagaatcatgtaagcgtgaaaattttttattcttatgacttgaaattggaagtgagattctttattataataactgtgttagcactctttagagctgagtgctaaaattacatattcatactattgaggaggttattacattgttaaagccattaggtgatcgcgttgtcattgaactcgtagaatctgaagaaaaaactgccagcggaatcgtattaccggattctgcaaaagaaaagccgcaagaaggcaaaatcgtggcagccggttcaggtcgcgtgttggaaagcggagagcgcgttgctttagaagtaaaagagggcgaccgcattatcttctcaaaatacgccggtactgaagtgaaatacgaaggtactgaatacttaatcttacgtgaaagcgacattttagctgtaatcggctaagcaaataaatatttttaaaaattcgaggaggtttcgttaacatggcaaaagatattaagtttagtgaagaagcacgccgcgctatgcttcgcggtgtcgatgcgcttgctgacgctgtaaaagtaactttagggccaaaaggacgtaacgtggttctggagaaaaaattcggttctccgttaattacaaatgacggtgtgacaatcgcaaaagaaattgaacttgaagacgcgtttgaaaacatgggtgcgaagcttgtagctgaagtagccagcaaaacaaacgacgttgccggtgacggtacgacgactgcgactgtacttgcgcaggctatgatccgcgaaggcctgaaaaacgtaactgcgggagctaaccctgtcggcgtacgtaaaggtatggaacaagccgtaaccgtggcaatcgaaaacttaaaagaaatttctaagccgatcgaaggcaaagagtctatcgctcaggttgctgcgatctctgctgctgatgaggaagtcggaagccttatcgctgaagcaatggagcgcgtaggaaacgacggcgtcatcacaatcgaagagtctaaaggcttcacaactgagcttgaagttgtggaaggtatgcaattcgaccgcggatatgcgtctccttacatggtgactgactctgataagatggaagcggttcttgacaatccttacatcttaatcacagacaaaaaaatcacaaacattcaagaaatccttcctgtgcttgagcaagttgtacagcaaggcaaaccattgcttctgatcgctgaagatgttgaaggtgaagctcttgctacactcgttgtcaacaaacttcgcggcacattcaacgctgttgccgttaaagctcctggcttcggtgaccgccgtaaagcaatgcttgaagacatctctgttcttacaggcggagaagtaatcacagaagacttaggccttgacctgaaatctactgaaatcggacaattgggacgcgcttctaaagttgtagtaacgaaagaaaacacaacaatcgtagaaggcgccggcgacactgaaaaaatcgcagctcgcgtcaaccaaatccgcgctcaagtggaagaaacaacttctgaattcgacagagaaaaattacaagagcgtcttgcgaaacttgccggcggcgtagctgtcatcaaagtcggcgctgcgactgaaactgagctgaaagagcgtaaacttcgcatcgaagacgccctcaactcaactcgcgcagctgttgaagaaggtatcgtatccggcggtggtacagcgcttgtcaatgtatacaacaaagtcgctgcagtggaagctgaaggcgatgcgcaaacaggtatcaacatcgtgcttcgcgcgcttgaagagccgatccgtcaaatcgcacacaatgcaggacttgaaggatctgtcatcgttgagcgcctgaaaaatgaaaaaatcggcgtaggcttcaacgctgcaaccggcgaatgggtaaacatgatcgaaaaaggtatcgttgacccgacaaaagttacacgttcagccctgcaaaacgcagcttctgtagcagcaatgctcttaacaactgaagccgttgtcgctgacaaaccggaagaaaacgccggcggcgcaggaatgcctgacatgggcggcatgggcggtatgggcggcatgatgtaatcaaacggaaaaaacccttgatacaccaagggtttgaccgtttttcatcaccccaattaaccgaaaaaataacaaaaaaataacatttctttatgaaatcccgaaattgaggatgtttccaaaagtctgctggactttgtgggaggcatcctctttcatttttttggttacatgagtataaatcttcatcgttgttttcatgtcgtcatgcccaactctttccattacagttggcaagtcaacttttgcctcggccagcatgctgatatacgtgtgtctaaatatatggggagtagcatgttttttaattgatgttttttccagtattctttccattcttacaatgatattttttggtaaaaagggatagccattctcacgagcaaataggaaattaccgtcgtggtattcgcttggatcaatcctggactgtaggcgcaacttcttttgtttggttacatgtgccttcaatatatctattatctgatcgtcgagagtgatagttcgcaccgatccggctgttttcggcggagttaattcataatttctcatattgttatcttcggaatatatggttttagtgatacgcagctcttttgtttcaaaatttatatcaggaagtttgagggcgcacatttcccctgaacgcatgcctgtaaaagcgagcaagtaaaatcgttcaaggtccatttccaaaccatggacttttactgctaagaggaactcttcaagttcttccctttcaagatatttttgctctattttactactttcaatatcttctactgtcattctctttttaggaactacagcgccagccactggattatcttttaaaagcttcacctttacagcgtatttaaaaatcattccggctgtcgtatgcacaccactaatggtggtacgggcatattcttgatcagtgagatcgttgagtattttttgatattttcttcctgttacctgagcgatattgattttagcgatataccggtttaagatgttaatttctttccttcgaatacgcagagttgcttttttctttcctgtgagagcatattcgttcaaccattcggcagcaagcttttcgaaagtcatttttttaacaactgattcatcaatgccatcttcttttaaggcatcaatagcatctctaactctttgttcagcttctttttttgttttgccacgccgcgcaatttgtttgcgtttaccggtaacgggatcacgaggtccgtcaccaacagccagccattttttacccttgatcaattcctctgtatacattttgtcaccccaatttttcaatgaatagttttaaagagctgtttatacatcaagaatgagaactgttttcttgtatacatatcgagccgtttagcagcaaattgatatgtaacattaaaggtatcacctattaattttataacctctgatttcatgcgtggcaacgaaatcttttcaagcataaaactaggtacacagaaatgatacataaagctattagcctgatactcttgcaactggcgaaacatacgattcatgttgaactggtttccgcaatgtttaatcacatgccctagctcatgaacaaagtcttgccactgttcttgcggagaggctcgagcatcaaggacaacgctatactcaccgttaatttgaaacatgcagctttctctttgctcataatgcagccagatacgaaatgccgcggcaatcctttctaaatcaatgtcttcaggagtctcaatatttaatttgtaatagatttttttcacttcttcttcaagatacgataactggattgacattaaaaacaccaccatgtagggaatgtatgttctgtttttggtgtgaaagaaaagcccgaggaagaagggctgtcataaattcaatagctgtttctttttaatttcatattcttcttgagtgatagcatccatatccaacaattctttatattttttcaattcatcagctgcagatacagtaggggcaggagctggtggtattgttggagctggaatagactgatgttcttctatgtatttttgaatttctaaaaccataggcagttcatttgcgccaaaagtgaaggagttatcgtcttgtattgcgtcccagagtccacttgtttcattagcagctggcgttaaaaattgaaaatagcctgaggttactaatccaggtttttttatttgaagcccggacagttcactgattctataagatttctccccactataccctcgtgtgatagtgttaacagcgccttttcttgctactcttatatagtttccatcaagtgtgattgttgtttttgctgatttaaaatagtattctttagtttctttctttaaatcctctttttcactttcgtatctttcctcattgccagagatttttgattcaacatatttgataaagccgtcaatatcaccttctgatattgaattgatgtttaagtcttcttcggctgttttaaaatcaatcttatgtccaattaatggcttgcgactggcagtaattttaattatttctttatagggccaattctttaaaattggttttttctttttcaagacaatgaaatatacttgattttctgtagcaataaaatgcccccatgtcgcgtcactcttcatagttccgcaaacgagttcatgaattgtttcatttctttcatcaatcagaggtttagctgcttcataagttttcaagaaatttttagaagccttcatgcgttttttaaactgacagttatagatttcgccattttccatcaaaaaagacaaatttaatttcccctttataagtaatacacttgagtatatttttttctgatcagatcccgtttgaatccagatgcaatccagatgagaaagaattctatttcccttgatataattggcttcaacctactggtgaaaaattcttttccgatccagttcggttctaatcccgatccaatcctgatcttattagtaaacagaaataacataataacaataatataaataaaggtttcggcagttagttactttttaggcttacggccttcacgttcttctttctctttgaggtactttataaaatcaattgcttgtttttgtctttcttctgagaagtcactcgcttctctaaaggcgatctgtagatcaggatcatcaaaaaggtcattattaaaagtaggttctttgccagttaggagataatcagttgttacaccatacaaacttgcaagtctaacgagcatttctccatctggtttccttaaaccgtattcccagttcgcatatgtagacattgttttaatacctaatttttttgcgacgaaagatttgctccagcctttcttttctcttaattcagttaagattttccctgttatattatccattattatacacctttttttatttggtgtgtaaattttaacacggtttacacacaagagataattacttacacaaaaagaataaaaatatgttgacttacccttattgtgtatattattatgtatttaacgagttacacgaaaagagtaaggtggtgagttaatagtgctagaaaaattacgggctacaagactttctcaaggaaagacccaaacttttatggcaaaaaagcttggctatagatacgcaagcggttatgcaaatatagaaatggggcgtacaaagccaagtcttgaaaaagcacaccaaatatccgagttactgaatgaagaagtcgatgagcttttttttaatgaaaagttacacaaaaagggtaacgagaaaactgcttaggaatgaaagttacaaaaaaacagtataggaggtcgaagttatggatcaaaaaaagctggaacaaattaaaaatttgttgaatggtatgtcccaatccgagtggagccgtgttaaacaacatgtcgatgtactgttcagttctaaagccgccaaattgcagtttgacgacccagaactgttagaagctaaccttaaacgtgaatttaggatgaatacttgatttggataaacattgggtgaatgcgatattcagcatttttgtaataaatattaacgtaatcttgctgatacatcgtgtgctcttctttagaattagggctccaaattgaagcaccttcttcccaccatatgtatggagaagacatagattcacctattttgcagtccggatcactagtcaagtcaacccattcaccacaaaggcaagcgtaaaccttagtagaagccattaaatctcaccaccttccatgcatattttaccacatgaaagtgagagattataaagctcattgtaaaggaggttttttatatgttcactatgcaatacgatgagaaattcattgaacagatagctgccaaaattgctgatagagcaacagacatgctggtagagcggctcagctctttgaacgagcttcctcacatcttgacgagaactgaagcgatggaggtgctgcggtgcggtcccactaaaatggcggaactgatggcccgtccggattttccggttaacgaagaatgtggcaaaaaaatccctacgactttgctttttaaatggattgagagcaacacgcgttgggttgctgagaacaccgcatactatcagaaaggagcttcggcatgaataatttacaaacattcaaaaatgaaattttcgaagttgcagccaaaattgagaatgatcaaatcctttttgatgccgagcaagttgctcggaacttaggcctcactaccgttgccaaaagtggcaacgtaacaatccgatggagccgtgtgaatacttaccttccggataactttccagaagtagagaaaggtgattttattcctgaaccattggtgtacaagctggcttttagagcatctaatcaaattgccgaacaatttcaagattggttagcctttgaagttatacccacaatcagaaaaaccgggggatatgtcgcaaatgatgaacagttcattcagacgtatttgtccaacgcagacgaaaataccaaattatttttcaaaacaactcttcacgcactaaaggagcaaaataagcaaattgaatctatgaagccaaaagctcttttcgccgaagccgtggaagcatctgaatcatctgtgcttgttggcgagttagcgaaaatcattcaacagaacggcgtaaagattggacctaacaagttatttcaatggctccgtgataatggttatttaattcgtaagacaggcgagtctttcaatctaccaacacagcgaagtatggatttgggtctctttgaaattaagaagagaacaatgaataaccctgatggttcaattagaactacccgaacgccaaaggttacgggaaaaggtcagatttattttgtgaataaattcatttcatcagaaacagcttgaaacaatctccacaaatttggggagattaatgttcgagaaaaggactagcttgtcccttcattaattaaattttaccagtgaacaactggatatatcaggaggcaaacatatggagaacaacccatacaatttgcataatctaccccggatcatgcgtagtgtccgcaaagcggcaggacttgcacagtatcagatcggtaatttgatagggggaaaggatcagcgatatgtttcggacgttgaaaatggattcagtaagcttaccccggaattatgcattaagtggtttgaggcgtgcgaggcatacgaacatattgatctggtacattatctcttcaaattgcacccgacgacggcggcgccaattgatccagcacttaacgagagtgcaagcgcggcggtaatcaatatgattcaccagcttgaagaagcattacaagcaacaaggcatttagcgcgctggttggcaaacgataggccaggccgacaacctgaagaactgcccatggccgatataaagcagatttttgatctgatcccagcaaataaaacgctgatatattcgctggcccgtagtcatggactgaacatgaaggaactggccgaaaggtggacgcggaaagcgctaatgagtcaggttgcaatggcgaaaacagaagaaaggcaggcggtgctggtatgaaaatcaatcagtttcttaaagcagatgcagattcagcaaaaaggaaaatcgagtcggcggaaaggctctctatcatgcttgcggaggcgttgcgggatggcgattatgaagaagctatcagtcttgcagggagcatcaaggttcttacagaggatataaaccggctgacgaataaagggcgcttacatcaaactgtcttaaatatggcggcccgcgggattcacctgagtgttgtaagtaggtgttcacaatgaatattgaaaatccgatggtcttgaacaactggcatgacaaactgactgagccggacacgcaaaaggattactttggggatgaagtaacggctttcgatgattacgtgatagatagtgctgagggtgaaatcatcttgagggaaaaccttgagcggtatctgaaggagcatcttggttttgaatttaaaaatgagcaataaaaaagcccacttggcagagtggactaggtaaggcgttttgataattgattgtattcctattataccaaaacgccccataaaaaacaatggaggttttatacatggctaaagcagttaaagtggcattcagtgagcgtgcggaggatcagcgacgtttaaggcaggtcggcggctcaattgtattctccaaaaacggtaaagcgcagtttagtttcccttcaatggatcactatcgggaatggcagcggcttggaacggaagcatataaaagaaaggtggcagaagcacaatgaatggattatcacaggtggattactcagattacatgccggcgccccagcaggctactggcgtgactatggaagcgatggtaagccgacaggctcaagaagtacaagcggcaatggttatcgcaaagaaattcccacgggacgtatacgcggcttttgaccggattaaaaaagcatgcgagcggaggctattggctgagaatgcggtatatgaatatccgcgcggcggcacaaaggtttccggcccatccatccggctggctgaggccttggcacagaactgggggaacattgattacggaattatggagttggaacaaaaggccggtgaatcatctgtcatggcttacgcttgggatcttgaaacgaatacccggcaaaccaaaattttcactgtgaagcatgaacggaaggcacggggcgccattaccaaacttgatgatccaagggatatttacgaaatggttgccaatcaaggagcccgccgggttcgtgcttgcatacttggagtgattccgggcgacatcgttgatgcggcggtagatatgtgtcaaaaaacattgattagtggacataaggaaccactggaagaccgactcagaagtgccttctccctttttaaaaaagagtttggcatcactaaggaaatgattcaggagtacatcggcagtaatgttgatgccttcactgagcaagatttcctgaaaattggtcgtatttacacggccctgcgtgatgggatggcaaagaaagaggattacttcaatgtgaaggccactagcgcgactaaatcaaaggctgaagaagaattcaaaaagctgaaagagcaagctgacaagcctgctgatagtaaagaaaaggcgggtgatcctgctaatgcggataccggcgctgaacaagaagaattattactctaacgagattgatagacactacatgtcaaattctcaatataaaagctttttgcaatgcgaggctgccacgatggcaaagttgaacggagaatggacgccgcccacatcggaggcgctcctcttcggccaatacgttcatgcctggcttgagggtgaacaggcttttgatgaatttaaaaagaacaccccatcactttttacacaaaagggccagctgtacaagcagtatcagttagctgatctgatgattgaggcgattcaaaatgatgatctctgtatgtttgttcttcaaggagaaaaggaagtcatcgtaactgctgaattgttcggtgttccgtggaaaggaaagctggacgtatacaacccagctggcggccgtttctccgatctgaaaacagcgcggtcattgcgggagaaagtttgggacccggaaataggatattgctcttttgttgaggcatacggatacatcgctcagatggcgctttacgcagagattgaaaaacggatgactggacggagcgaatggcttgagcccctgatcgtaggggtttcaaaagaagatccacctgataaagctgtcatcaatattgatgagggcaggctggaaatagagcttgaagagattgagcagcggatggatcggattttgcaagtgaaacacggcggagagaaaccagagcgatgcgaaaaatgcaagtattgccgggccactaatcaactgaacagcatcatccatttttcggagttggtgagctgatggaaagggagctgatcaggattcctatcccgcattgttatctctggctggtcaaaacggttcagcgcgacttgagaaaggacttgtatacccggtacacgactgactacttaaagacaaatgagccgtctctgagattagtagaagtagatttcaaggctctgacagcactgtgtgaaaggaagtaggtgagcggcatggatatgcaaggtttggggtatgtggtcctgccccggctgccatttaaagattcacgagacgagacaatatacgattatttattcaaacgggcggagtacagggcagatcaagaactaaagctcgggcagacaatcattaagcttgtagatttagccaagcgcttcaactggtcttctgatcagatcaaatactcgttagatcggatggtaaagcaagagtatttgaagctggaccggctgccgcaaaaacgcggtttcattgtgacggtgttgaattatgccgagtacatacagcttggaaattacaacaagaagatagacccggctccaatacctttaggacagcaggaggttgacgaaaaaatgaaaaacgcatttgaactattcgaaaacaaaacagcccgcaccattggcacgatggaggttcagcggctcggatatatggtggatgattacggtgaagagaaagtcatggaggcaatgaaacaggctttcagattcaagggcaacaacgtcaatctgaattacattgaagccatcctctcaaacccattcagccagagacgaaaggagaaacagcagtatggaagctcgcaaaacgcaagatatggacgcggcaatgaaggcaattctaaccaagctccgggatcggtcagcagcatcttcaacgggacaggccgcctcagaagaaaaggctgaatacgagtgctctgactgcaaggataagggcattattgtttaccgtattcaccaagacaccgagcgccaattgagaaaagagcataagacaatggaaagcctggcccctgatcaaatggtcagagaagaggattatcttgcggggaaagtatgcttgccggataaggcccgagaatggaaaaccacattttccaagcaatgcgagtgtgtgaagcggaaaaagatcgcccggcttatgaaggccagcggcatcacggaggaattcgaaaagctcctttttggaaacttcattaaggacgggaagccggatatgatcaaggacgcttatgagtgcgcggtggaatactataaggattttcagagcatcaagggaaaacgttcaaacagtatcgctttgctcgggcagccgggcagcggaaaaacgcacttgttaacggcgatcatgaacaacctgattaagaaaaaatcaatttactgcatgtatttcccgtacgttgagggaatgggcgatctgcgaaatgactttgatcagctggaaacaaagctcgacgctatgcggaaagctgaagttctgttcattgatgacttattcaaaccagtaaagggggagccgcgggcgacggattggcaagtggaacaaattcaatcggttgtgaattatcggtacctgaatcataagcctctgctaatctcttccgagcttgatacgggggaaattttggacatagacgaggcgctgggctcccgcattcatcaaatgtgcagagattacacagtgaccatcaagggcgatcggatgcaattaaaccataggttaggagattgggaatgacggaaaaagcgaacttcacagcaaccggcggcatgtacgtgttcgggcctgctgagcaaacggccggccaggaccttaccccggcgatccgggtgcttgaggaaaaaatcaaacaaatggagctgatgcacagtgcttaaagcggttatactgctgccggccatcatcctcacagcgccgtacaaggaaaagcagattcagcactgggaacaaattgacgggaggtaatgacggttggattccattcagtttatagtttacggcgagcctgttgcacagggaaggccgaggggatctgttataaatggcaaggttaaaatgcgtgatcctttgaaatcaaagaattttaaacaatatgttgcgctggtggcgtcacagtatcggccaaaacaagttattacgggacctgtggcaatggatgtcagagtattcagaccaatgacgaaagaaatttctaattccaagacaaaaagagaaaatgcggaaaagggtctcctgcgtcccgtaacaaagccggacgttgacaactatgtaaagggagttaaagacgccctgaatcatctgatttaccgggatgatagccaggtagtcgatctgaaagttagcaagttttacagtgaagagccccgggtggaagtcattataacggaaatcctgccataacgctttgtggagaaagtttgatgcttgagaactaaatcaattcaggaggttatcgctatgcaagaagaaatcaaccgatacaagcctggtccagttaagaagtggaaaatgacgccggagcaattggcagcttacatcgaaaagcatccgatcatttaccgcgaggaattaaaaccatctgccggagtaacgatgcggctgccgtcgtaaaacgtaaaaaagcaccgaagccgtggccccgatgctctgatatgaactggtacttctatcatagcacagggggcggccagagtgaacaagccgacagaaataaaaaatcatgaaacaactattcagcaaagcatcgagccggggaaagtccgcatcatcgttttagatggcactgaagggactgctcatctaatggacgccccggaacacggtaaaacaatcattcaaacaataaaaggcggcctggctcgttgtgattacgagatcggccataaattcaattagcaggggttttcccctgcgggggaggaacggaaaatgtatcaaaacgaaattgcccgcaagtgtgaacgctgcggaaaaatatattattcagctcaatgggttgtatgcaaaacatgtcttttagaccgggaggcccgggcatgaaagaattcaaaatcaacttgtcaaaaggtgaggttttatataccggctcttacatttgcaccctttcgaaaacggcggccagtacaccggagcaaatatctttagaagcagcagccgaaaagctcgcggaagagttaatcatgcaacaggctatgaatcgggagcaccagcgccagcaggatgtcacggtcattcagtttcggcaggctcaggaagatattaagttgctacaggcggagaacaagcgttatagaaacgcattagaattttacgccaatgaaacgacgtatacaaacgaatttgaagactgtccgcctgctgtcgaactcgacggagggcaaacggccagaaaagcattggagggggctgcggaatgaataacataaaaatccgatacgtattccgacataaggaaacaggcaatgttgaattgaaaacgtactatatcagtcagcttgaagaacgcccggcgcgcaaactgtctcccgtcttttgtgaagagtttggttacgagttgatcagccgcgatttatggacgggcaaaaagcttatggaaaaagaaatatatgcgggagatattatctgttataaatcacacggccgggtgtttaatctagtcgttaaatggtcagaagatgatgccggattttatgcgggtggaatacgttgggattttgttcaaatgtatggtgagttaatcggcaacgtacatcagaatcccgaaatgttaggcggtgctgcaaaatgatgccattacaagtcgaactacaacggaacgtgaaggccacgaaggacgaagcgatgaccgtcgagcaggcggccgagcttttaaaggttcacccggattacatcccgacgctggtcgctcggtctgacgatctgaaaatgatcggtgaccataccattatcgctaaacgggataaaacaaatatctggctggtcggggcatgcgtggggcttttcttcttcgctatctccgtgctgccgaatttgatcgggggttaagggatggcacgctcaccgttaatctggtttggcggcaaaggtcgatacgccgatcacatcataaataaaatgcccgcccataaggtgtacgtcgagcctttcggcggcgcggctcatgtcatagcgaataagccgcaaatgggacatgaagtgtataacgacattgacggccatgtggtgaatttcttgatgcaagtcagaaaggatccaaaggccatgcagcaggcttgcgaatccattccgtacagccgggcgctctatgagaaatggaaaactgaagattacccgcaaaatgattttgaccgggctgtcaggtggttttatatgaatcgctccggcattagtaaggggaacgtggaggaagtgccgcagacaggctggaggcatagcacacaaagcgggcagaaccctgctggcggatacataagcgcctgcgctgccttcgagtctttcgccaaccgtatgaagggcgtcatgatcgaatgtaaggattttcgtaacatcatcgagaaatacgatagcccggatactttgttttatgtggatccgccatatgttgggcgtgaacggttttatgctggcggctttaacgaagaggatcatcgggaactggcccggctgcttaatcaggtcaaagggaaagtggttctttcttattacgatgatcctttgatactcgagatctacccgaactgggagtcagaaaccttttccgcatacaaacaggttgtcggcggatccggaaaaagccgcggggctgaagaattattgctatttaactataaaatcacacaactcagcttatttgatcaggagggaacccaatgccaacagcagagcaattgaaacgaatgaacgacataaacgatttgatcaagcttatcgcaagcattgatcatcgtacattctaccgcaagtcaaaggatcgcatagcgtatttcagatttaagaaaaaactgttcttcgttgatgattacacgggcgctgatgtttacccgtatgaattgggatacggcagttcaaacggcttttcgcatgggggcaacatgtggcaactggtcaacagcttcagaaaattcatcataacagggaaatgcggcgagctgagggattataaagaaatatgggcttacagctatgaaggatgtatgaaaatccgtcagaaggcgaaggagattggtttcattgaaagtgttgattacccctacagctttgatgaatgggcggatagtaaatgatcgaatatcattgcccggactgagattataaaaaacttgatttagaaatccgcgcagatgcccgctgcccgcattgtgggcgctgcataggtggtgaagtggaaaatagaagagcatattagaatgctcttctattagaaaattaatagacaaatacgtgtaactgaccgtatactgatccatttttgaatatagttaaatatgcatttccagctttattgccacggacaagcccattggtatctactgtgaaaacagcgctattatctgaatgataagcgaatcctgatcctaaatatttggcatctaattgtttagaacccccggctctcacttcaaaggtatcgtaataggctttaattggaccaggagatatagttgtttgcgtttcatttttttgaggagttatctccttagcggaagccataccactaatggaaaaagctaatacaggaatcgctagtgcagtaacagcagtctttttgaaattcattttaaacactccttaggttttttattgaacacagtaataattcgagcaaaataatgattatccttgtaaataaatgttaattatttgtgaactaggaaggggaaaataatgaaaaaactattcaaatcaatcattctatcagctgtattacttatgggagccgcggccgttgcgccgtctgcttccgcagcatggtccggctggcaaaatgaatccgggtacagcggccgggtgtttacggatgccgcgacttacacggccggcgcctcaacggtggactggaaagccgagaaaaaaggctcaagcactctttattacacggccggcgtatacaagaagcgtagcggcggcgggcttactgaaacgaatctggtacagcgaggcagcttcaaaacggcaacgcctctgaaatcattcaacgtgaaaacgatccggaataagaccgggaaagggacctatgtcattcagctggactgctactctgattccggcaagtggaactatatcggaacatttgaatcagcaaaatttcaaatcaaataagggggattcgatggcgctgagaatagtttttatgctgatggggttaggtttctggttttatttccagtacgaatacaggccggacatgaaagcaaacatcacgttaataggcgcaatcatcgcattcacggccgcggcgttttttcaagatattgataagtatatagagaagagggaagacaaatgaacggattttctgagattgaacttcaaatgattgttgatgaattaaaaaagggtatgcctttacaactgcagcttgttagccatacgtcaaagctgattgtggcttactatcaggaatacaagaagaatccatatgtggagccggcggacgtggtgcctctagctgttaaatccggaatgaatcaaatgggtcttaattaggaggagagagatgttaatagcctttaaaatagctctcttgctggtcctgatagtctctcttatgggagttataggagaggataaggattcacagctaagaaatcacttaactgcaatttgtatagtagcgatcatcgggaacattgctacatatgtgctgctttaactgaataagtccaagacggaaagcctgcggacactgatcattgcacagaatcactgtgctctgattggtgtccgttttttatttgaacggagggatgacatgaagcagaaaaagaaaaagcccaataaaaacatgcaggagcgctcagatcgtttctggcaacaaatgatgaacacaaacatgcaaacacttaaacgaggcaagggcggcgcatttaagcgcaaataaagggaggaatcagaatgcaagatttaatcattgagtacaaacgagctttaagagaaacaagaaaaatgtatcggctctacaaagatacggctgaagtcaatctgacggctgaacagatcaacgacaaaaagattatcagtagcatgatcagcgatattgaattcactcttgaatggctgcagaacggaagacagccgggcgcacgccgaggtgctgacagaagagacgcatatcaaaggacgattcttgctgaacctcgcttaattgatgcgctgccggaagaatacgcaatcgttcaagaagctgagggagaagtaagtgattgggataaggaaagaatcgctgatgccctatccgtgcttaccgaaagagaaaaagacattttcatgatgcatgctgtacaaaacatgtcattcgaagagatagcgcagttattggggattaaaaaaggaactgtgcagaagaacatcgaacgttcccgcctgaaaatgaaaaatagagcagatcacagcctattctgtttagcgtgaataggctcttttttattggagaaataatgaaaaaagcccactaaattacttgacgtgagtaaataaacgatgtataattaatgtatagaaaggagggaaagaaagtggctgaaatcgcattggtactggggattatcctcacaactctcacagttgttgagaaagtcctcatcatcagggaaaagcttaaagcaaaaaagcccaaaatcaaaaaacgcagacgtccaagaaagcgcagatgattttgagccgagggagaaggtagcgcttctcccttgctccaagtatagcaaatgcggcgactaaagaaaaatacttgaaagccagccactttcaaaaaaatgaaaagtgtacagtccactactgatattgttgttcttctcgccctggcgtatatgctgtttttccgtcaggatgtggcagcgggaccgttgaaaacggctctcgacattagtctgatcattttatttgttgtttcgatcatcgagaaagcattttccctttacttgaaatatcgtgagaaaaaaggatgattcaaaaatgtacaagcctaaagagcgtgacgcaatcaagaaattcctgaatgaagagatactcaatacaagtgaggcgcttgagatattggggttcacccgtcagtatctgaaccagttagtaaagaccggggaattagagccgatgaaagaaatgccccgggacaggctttttctgaaagaggatattttagatttccaaaaacataggcggaaatgagcaccctgttaaaagggtgtttttttgtcttacggttgccacctatttatgaaaagtgctttcgttcgacaaattttgcaaatagttcctttatcacactccttaaccgataataaggtgggaggtgagaatatgatgccaatggtaaaagaatttaatgattttttagagaaacaagggcatagatcatgggaagatattgaaaaagatatgcaagatgagttgtggcggattggtagaaaatacgatgtgacaggacctacagtattccatgagtatatggattggaaggcaagtaaacagaagaaaaaaggataggtttcattaagttacttttgttcatattatattattcagattaattctagaagtggtgagagaaatatggatttgaaaagaatagaaaaatcaattgttcatttaaaatgttacagtgaagataaacaagactttggtactgctctttatgtgaaaaaaggtaataagcaatatcttattactgtgaagcatctaattgtgaatagaaattcaggaaagctccatgaatctataaacaaagcaaacaaatatgctgagaatctcaaaactgtaggggtcgatcaaatatatcgattaggatctggtgagtctggagaggcgcctgtagtttatgaaaataatcactttgagatggacttggctattatatcacttaattttaatgagacaattgaatttaagagaaatttagaatcatccgattatacacctttggattttaaacacatttctgataaaaagttaacgccaggagatgatctatgtttgatagggtatcctgacttttctgatttaggtgtcgtcaatcctatgttaacaaatcagcatcttcctatttattcatttggcaaagtgtctttgttccataaccatttaaactattttatgggcaatatgtttagttatggaggttttagcggcggccccattatttataataataaggtggttggtattaatacagctcaaatagtaaactatataaattgtgagaaagaggagcaaccagttattaagtatccaatgaattatataattaaggctgatattatattttcgcttatgaaagaaatagaatcaaatgaaagccagcacctgcacctttaagggtgctttttttgttccttgtaaaccggttccggtaagtctcaggaaaactataggtggttaacggtctgagtgcggcgtcggtttagagggaatatattttccaaaacaaacacgaatcagaaggggcggcggtgaatgtagatggttgaaaagcacattcaggcgtataaggattacgtcaaaggcgtgaaatacaaggaccttgccgaaaaatacggggtgtcagtgaacaccatcaaatcgtggaagcagcggcatggttgggaaaggaaaaagggtgcacccaccgaaaaaagtgtgcacacaaaaataggcgggcaacccggcaacaaaaacgcattaggaaatagcggcggggcggctccggcaagaaatcaaaatgctgtatcacatgggttcttctcaaagtatctgccggaagaaacgcttgaaatcatggaagagattcaggagcgttcccctgctgatatgatatgggatcagattcagatacaatatgcggctattattcgggcgcagcgcattatgtttgtgcagaataaagatgatacggcaaaagagcttaaaaaggcaaaatacgcttatcatcaagatgaggacgaagatggcaatctaacatatgaaaaaaacattgtagaagaagaacttgaaatacagttcgcttgggatcgtcatgcgactctcttaaacgctcaatctcgggcaatgggggagctccggagcttgatcaagcaatttgaccagctggcgcatgagcaagatgagcggcgtcttaaattggaacagatgcgcttgaatatcgagaaaacgaagaagaccgttaatggcggcgatggaaacacccaagaaaatgatattgctgcaatgttgagaaaaatggtgaatgccgatggaactgaataaaaagcaaaaggaagtttgggacagctttattaaagagcaacccaaaattctaatttgtagcggcgcaaagagggcaggaaaaacattcgtgctccttttgacgttccttgctcacgtcagtaagtatcaaaatatgggtttatccttcatcatcggcggggctactcaggcagccataaaacgaaatgtcttgaacgatatggaactgattctgggtaaagaattgaggctcgacaagtcgaatgccgttgaaatattcggcaaccgtgtatattgctttgatggagccaatgctgattcatggaaaaaagcgcgggggttcacatcagccggcgcattcctaaacgaagcgactgccctgcacgattcattcgtgaaagaagtcatttcccggtgctcgtataaaggcgctgtggtcatgatggatacaaatcccgaaaacccgatgcacaccgtcaaaacggattatatcgacaaagacgggcaaatgctgaaaagcgggcggctgaacatcaggtcatttcatttctcgctgttcgacaacaattttctcgatccggaatatgtggagagcatcgtggcatcaacgccgagcggcatgtttacagatcgggatatacacggttattgggtggcgccagaaggagtcatatacaaggatttcaataaggacatccactatatcagctctgaggaattggaaaacaggcgcgtcaatttcaagaagtattttgcgggcgttgactggggatatgagcacccgggttctattgttgtaatcggacaagatgaccaggggtgtttttatttgctcgaagaatatgccaagcaacatgaggaaattcattactgggtgaaggtagcgaaaggcgtaaaagagcggtacggaaacattaatttctattgtgatacggcacgaccagaacacgttgttcgtttccggcgtgaaaaacttcgggctattaacgctgataaagctgtcgtatccggtatagaagaagtagcgcggctgttcaaacaagaacagctttttgttgttgaagacaaagttgaccggttcaaaaaagaaatctttatgtacgtctggaatcagaagacaggcgaaccggttaaggaatgggacgacgtgctggactcactccggtacgctctgtattcgcataataaaccgaaaagacggagaggggtgagctgatgaatcattttatagacatgattgaacagtccggcataacgcctgaattgattgacaagatcattcaggaacataagccggatcatgacagaatgaaaaagctttatgaacggtacgaggctgaggttcaaggcgttccgatcttatccagagaagccattgaatacgaagattttgaaacaggaaaattaaaacgtattgatcacaaagtaaacaataggcttaacaactcgtttgactctgaaatcattgatacaaaggtgggctatttgttcggccaccctattgcatatgagtttgatgagagcgatacgacaagcactgcaatacctgtaaaacagttgatcgaaaattttaatatggaaaataacattgctgatgaagacagcgagtgggggaaaatggcctctatttgcggttacggcgcccgcctcgcttacgttgatcgttctggaaacgagcgtataaaaaatattgatccatgggaatgcgcctttattactgatggaagtatccatgaacctgcttatgctttgcgatattacacggtgtacggcggaaagatcaaagcagaattctatgatcagaaatatgtctattatttcagtacgaaagacagctcagccttcacttttgataaaaaaacattgcatctttttgatggctgccccttattcggtttagcgaataacaaggaactaaagggagatgctgaaaaggttctttcgttaattgatgcgtatgaccgcacgttgtccgatgcatcgaatgagattgagcaatatcggctggcatacctgattttaaaagggttgggcgctgatgaagagacgcttgaccagctcaaaaagaccggagtccttgaattgcttgacgaaaaagatgacgtaagctatctgacaaaggatataaacgatgccatcatagaaaaccatcttgataggttggaagagaatatccttcgctttgcaaaatcggtcaatttctccgatgaatcttttggtgggaatgtttcaggggttgcgatgaaatataaattgatgtcgcttgaaaacaaatgcatcacgatggagcggaaaatgactgctgctctgcgttatcaatacaaactgatcttttccgcatggggcactaaaaggaaagcggcagcggaagattataaaaaagtttggttcggatttaagcgaaaccttccggcaaatgtactggaagaagcacaaacgacagggcaacttaaaggaatggtaagcgaagaaactcgcctatctctgctgtcgtttgttgatgatgtccagtatgagctgaagaagatggaagaggaagaagaggaatacaggctcaacatgccgccgttaacggatgtggaaacagacgcgggcggtgatgaagatgaaccagaatgatattgataagtacctggacgacatgatcactgaggatgctcagaagattgatgtcgtttttgcgtctcgcttaaaggagatcaacgcacaaattgcccggctgtatgcgaagtacagcaaggacggccagcttactttagccgatgccaacaaatacaatcgtctgaacaaggaaatggagaggatggccgaggaatctcacaaggctttcaaaaccattctgactattgttgaggcattagcagccaagcagtttttagagaattatatgcgttctgcttatctatttgaaatggaatccgtggttaacttgggttttagcatcccgacagccgaagtcattcggcaggccattctaaaccctatagctgaattgactttgtcagctatttacaggcggcatcgagacgattatgtccggcagattcaaatttccgtcgcacagggcctacaagcgggggaggattattccaagatcgcccgccgcattgaaagagcgaccgaatttgcccgcaggaaagcccgtgacgtggcgagaacagaagctcatagggtacaagtctcggcgaggatggaaagcgctgagaaggcctcaaaacggagcaaccttaaaaagatgtggaatgctactcttgatcttaaaacacgagccgggcacaggaaactggacgggaagacaatagaacgcaatgggctgttcaaatcaatttacggcggagtcgggccggctccggggcacatgaataatgcgaaagatgacataaattgccgttgtacgattgcttttaaagtaaacggtgtgctgccggatacgagaagggcgagggaaggcggcagtggggcaggccaaacaattccataccaaacctatgaagagtggtacaaatccattgaggaaaagggaagacgttaaacagcggctttttattttgtcctgagcatgacgttaaaaggcttatttttcatgcactcataacaggcgcgcactgtagagggcgaaggaggaagaagcgtaatgccaactttagaagatgtgaaaaaatttctcgaagaaaataaagaaaacgaagatgtaaaggcgtatctgaatgaactttctgccgtgtctgctgacaaggtgaatgggtttttagatacagaagaaggaaaacgtctcattcagcctcggttggattctcattttacaaaaggtcttgatacgtggaaggcgaacaacctcgatgctctgattgatgcaaaggtaaaagagctttatccagaagaaacagaagagcagaagcggatcaggaagctcgaaaaggagctggaagatcaaaagacagcggcacaacgtgaaaagcttttaaacaaagctgtttcttatgcttctgaaaagcaactgccggcagatgtagtggaattctttatcggtgaggatgaagaatcaacgatgaagaacctcggagcattcgaagagaagtacaatgctgcacttcaaaaggctattgaatccaagtttcaagagaatggccgtgatgtccagtccggtagcaatgaaccgacaaatcaagatttagacatcagctcgcttgcagctgaagcaagtattagaaaataaggagggctatttttaatgccaacatttaatccaaacaatgcattaatgcaagactcagtaaatgggaaggttccaaccgaacaaggaacgctggttttaaaagagtttatgacccaatctgctgtcacaaaactagcaaaatatgaagaaatgagtaagccggagaaggaattcacgtacttggcttctggaccgggagcttactgggttggagaaggcgagagaatccaaacttctaaggctcaatggttaacagcaaaaatgatttcaaagaaattgggtgtcatcatccctgtttctaaagaattcttgcgctactctgtaacagatttcttcacacaaatgcgccctgctatcgctgaagcctttgcgatcaaatttgatcaggctgcgttattcggtgtagattcaccgtttggaaaaggcgtatctgtatttgaaaaaatcaaggaatctggtaacacaattgcgttaaactcacttggcaatctatatgatgagttaaacggggtcatggctcttgttgaagacgctgacaaagatgtaaacggctttacaacaacacgccgattccgtcaaaagctccgcggcactaaggacggtaacggccttccgatcttcaacgatgcgacaggcggcgccacacaacaagcccttggccttccgatcggatatgtggattctaagtcatgggattacgaaaaagcggcattacttgcggctgactggaattacacacgttacggaatccctcaaggcatggaatacaaaatctcagaggatgcaacattgacaacgattgtcgatgcagacggaaacccgatcaacttgtatgagagagatatggttgctctccgtgtaactcagcaagtcggattcatgacactgaccgatgatgcttttgctgctattacaccagcaacggaggcgtaagcttatggggtacacatctaaaaactatagcactaataacggcgacaaattggtgatcggcggcgagctcgaaataaaagagggtgcgaaggtgactgggttatcgggttctgcgcctgctcctaaaactatcacttcggaaatgatcggcgacggagaagtgaaaaacatcaatatcggtgactgttctgtccaaaatcgtaacatcggcactggtagtgtacaaaatgccaacatcggtgccaaggcagttactttagctaaactcggtgacgatgtgaaagccaaactatctgatttagagaatcggataaaagcactggaaggaggcggcgcgtgatatgaaagcatctaacggttccaaaactattgaatgcactgaaaaggcttttgaggtggtttattctcacattggttttaagagagtggatgaggccaaacaatctaaagagctgaatgaacggccgggtacaaaccttcttgatatgactgaagagcaattgaaaaaggtgaataaggatgaaatcgttgcctttcttaaggagaacgaatatgaatttgatcccaaagcgcctaaagaggaactgatcaaaattgttctcggtgaagtgtaggtgattctatggatgttcaaaccgtaaaaaatatgcttggcataaaaacagacagccacgatacctatctggccgaggtcctacctctgttcatagatcaagcgaaagactggtgcaacaactcattcatggtcaatggagatgaaaaattaccagcaggggtaaagctgtatgtcgcgaaagcgatcgagcataacatgactccttccaacctttcaggccgaagtatgggagatgtctcatattcttatgaaacagagctgccaagcagcattacgaagcttcttgctccatacagaaagctgagagtcatatgatctatgaagaattcccgcatatcgttacatttcagcgttgggaagaggtgccggacggcggcgggggctatgttgaaaaattcactgattatctcacaatagaggcctttgtcggcgggattacgtcccgggaatattatcaggctcagcagcttcagaacccggttgatttcaatgtgtatttcccgtatcgcaatgatattgagaagacaatgcggatcatctacgagaacaaggtgctgactctcaaatcagatccgatcgaccagggcggcatgcatgagattatgaatttgaaatgtcaggttacgggggtgctgaagggcaatggctgaggtcagtggtagatgggtcaggcagatgcaaagagccacaagcgagttcagaagccgggtcatagatgatattaagcaactggtcacagacacggccgagctgatttacagccacgctgttctgaatgctccgaccgccgcaatagacgggggaacttgaaaaattcaattgaaatcgactaccaagagggcggcttacgggccgttatttctgttggtgccgattatgccgtatatgtggaatacggaacagggatttacgcagaggaaggcggcggccggcaaacgccgtgggtttattatgacaccaagcttaatagatgggtggtcacgcggggaatgcgggcacagccgttctggaatccagcggtggacgaaggcatgcggtattttgccagtcaaatgtgatagaaaggagctgtcatcatgcgatctgccctgtggccgttgcaggctgctttatttaagaggttatcaacagacgaagagctgaacgggcgcgtcacgggcgtctttgatgcagtcccgaaagatcagcaaaagccttatgtgacaatgggcgatgatgatgtatccccatttaaaaccaagacatccagcggtgaagaaatcaatgtggttttacactgctggtcaggttacaacggaaaaaaagaagcgatggagattttgagcctcatgcttcaagcgttaacaagcaggcccctaacaatagagggcttttctttatgccgttctgagttgcgcagcatgcaggtgatcaccgatattgacgggtacacgcgtcacggcattctcagaatgcgcttcacaataaacaattgagaggatgaacaaaatggcagatttattgaatggtattgatgaggtttactttgttcaaccgatgaatgctacttcaactgaaggtctgtttatcgcattccaaacagaaggcagtcatacgaaagaacaagatacaaaagatgaatcaacaaagtctggccgaattgttgggtacggccctaaatctgagagcatcgaactgacatactatgctgctgtctctgatccgggtcaaacggcgattgaagatgcttatgacaacgaagagacagttcaggtatggaaagtaaacctgaataaaaacaaaaacgataagcatgattctgaatatggacatgcaatcatcgagaacttagaaaaaagtgcaccgcaagatgggtttattgaggtttcaacaacattgcctgttctcggtaagacccgtaaaggtgaacttgatcctctgcctcaagaattaattgacgagatcagatcttctgccggtgccaaagagttcatgcagtttggcgagaatgccaaaaaaacaactacgccctaatgcgccccaaaatctatcgttcacggctacagctgacagcgtgaccgtgaaatgggatgcggtagatggggcaacttcatataaggtatacaggggagcgagcaagcagctggacgcaactgtcactggcacatcccacaccttgacaggaattgcggccgatacgaaactcacggtcaacgtctctgctgtgaacgatgcgggtgagtcctcaatgactgagattgttacgcaaacacaagcggttacgccctaacgttccccgcaatataactgcgaaaagcgccacttcaaatcaggtgagtttttcatgggatgcggtgaaaggggcgacatcttacaatatttacaggttttatgcaaaaatagcgactgtctcaaagaattcgtacacgtcgaatcctaacctgaagccggacactgcctacatttttaatgtgtcggcagtgaactcggctggggaatcggaacgatcggccaattttacgatacgaacagaaaaggaatcatagggtccgggcttcccgggctcttttttaacatacaaaaataatcggaggttttataaatggcttacttaactatcggagataaagaatacaaatcacgctgcgactttgcttttgacagattggcaaacgaaaaatattccactgcggacgaaaagggcaaaggcggcacaatgaatatttacatgagtctgctcaacgaagaggcttcctatctttctgctttttgggattgtgcactcgcttacttgaagaaagaaaagccatcaactgaggctattgaagaagcaatcatgaaaatcattgatgaagacgagacaggcgacgcaattgacaagatgatcaatgaagcattcacaacactggattcagcgggttttttcaaaggcgtaatccgtcagcgttggaagatgatggagaagatgaacaaagggaagaaaccagctccgaacgaaacaccggaaatggaagcgaaacggttggaggacgaagagaacggcaaggaagtcttgaagatgatgaaagaggcatacaaagagagaacgggatcgactacgaccaaataattacgaactccgcacattggctcggggtttatgatgtggatttaatcatgtcatggactcctaacgagtacaagcttctgctcaaaggagccaagttgcgagaaatagatgaattggagcttatggcaagaaacgccatgtttcatcgttacgccatgaatgagaagcgccccaaagaaacgaaaatgtttgatgcgaagaaggccagacgccaattggagcgcaatatcactggcgataacgacaaatggcgcaagtcagatgtaaacgagctcggcaaacgagccaaaggggttcagcggtttaatgatgcaatccgcaaccactttgcaaaattcggacaaggaatggggtgagggaatgatcgaaagactgacagcaatagttgaagcacagacaagaaaatttaatcgcagtatggatcgtgtcaacgatataatgcgccggatggctgatcatcacacagtcgaggttgacgccgagattgccagctttcaggcaagagtacggcaggcggcgcaacaaatagataactttgttcatcgacatcaacgcacgcgagttgatttagatgcggattcagaccctttaactcgggccatcaattgggcgaagcaaagattaagacagattccccaaactgtcaccacgcaattaatggggaatgtgcggccgttatcttccgcattggcacgcgctaaagcagggctatcggcggtggcgaacagaatcacaacgacgatagacggaaatcccactcctttagggcgtgctgtcgctgttgcgcggtcagccatagcatcagtatctcataacgtaactaccacttttaatgcggccacgtcgcctatcatgcgcggggtttcggctgtccgttcagctttggcttcactgccaaacagaattaccacggtcataaacggaaacacggctgcgcttatgcgctctgtggcaacggcacgcgctgctctggcgtccttgccgagaagagtatggattagtatagaagctcgaattgatcggtttgaaacgtcaatgaacaggcttgccaagatcacaaactcagtttcaacggtcatcggtcattcaattgccggggcattaacgtccctacttcctgcaatctcgccagcccttgcaagtattgtcggagcaatcggctcattgggccctatgctcggagtggcagccggcggagtaatggggttaaccagtgcatttgcaacagcgggaacaggcgcggcggcattcggcgcccttgctattacttcgataagcggtgtattcaaagcatccgaagacctttccaagctacaggagaagctggacaatgcaacaagcgcaaaagagcgcgctaaaatcatgaaacagatcaataatctgcaaaaatctcttggaaaagaagagagagaggcattaaagaacctcgaagactttaaagacaactggcgggacatcggtacgatggttcaaaagccgatcttaaaaacattcggtatgtctcttaatacgttcaaactcgcgcttaactcactgattccaatgtttgacgggctggcgaaagagggcgtgggactggcaaaaagcatggacaaggctttcaaggctccggacatgcagagattcatttcctatctgaacaaagaagctccgaaggcgtttgcttcattcggccgatctgccgggaatgtcttgcggacagttttcaatctcatcgtagcattcggaccgaccggaaagagcatgacaaagtctatcgaaggaatgacgcaatcatgggtgaaatggtcagcgaacttaggctcctcaaagaaattccaggctttcgtggagtatacaaaaaccaacggcccaaaattgttgcagattatcagaaacttttcgggcggcctgacaaagctgtttactggattcgctcctatgtctcaagacatgatgacatccctcgtagacctgaccaagcggttcaatgagtgggctggcagcgttacgaaaacaaaagaatttcaatcgttcattgactatattaaaaccaacggccctacagtatggagcacattggggcagatcgcgaaaactatcatcaacttgcttgttggcatggctccactaggcaaaacgattttggagaatgtaaacgggtttttgaaatttactaatgcggcgatggaagcaaacccggcaatcgggaagttcattgcggcgggtatttcattaatcggtgctttaagagctattgttccggcgatagtagcagtcagtgctgtaacaaatgggcttaaagactttatgactgctgctcgatatattcggagtttcagttctgccgcatccggaattagaatggccggattgatcacccaattaaaatcagcgatagttactatagggcaattcattgcgagatataccgttatggcagcaaaagcaacagctaatgctgtgaaaatggcagcatcatggactgcgatgaaaatcggttcttttataacaatgctgaaaaacggcattaagcagatgggacttttcattgccagaataactgttttagcagcaaaatcagcagcccaagcaacacgtatggcagcggcgtggactgcggcaaaaatcagttcatttgtgtcaatgttggcggcaggaattaagcaaatgatcttatttggtaaacgcttggtcattctggcggctcaagcagcggcaaatgcggcgcgcatggcagcatcatgggtcatcgcaatggggcctatcgggtggattacggcggcggttatagccttagttgttctcattattgccaattgggataaggtcaagcagtacacccttcaagtttggggtgtcatatctcagtggctccaatctgtatgggaaggcattaaaacagcggcaacatcaacatggaacgcaataacgtcgttcttctccactgtttggaatggaattgtttcggctgctaaaaccatttggaacgggctatctgctttttttaagtgggaattcaatctgtacaaaaccattttcacaacagtttggaatgctataaaatcgtttgcctcttctgtctggaatgggattaaaaagactgcgacttcaatatggaacggcattaagaacaccgttacatcaatttggtcaggtctcaaatcggcggctgtcacagcctttacgtatatgcgggcccagatcgttaacaggatcattgcgacgagagataaaatgatcagcatctggaatgcaattaagagtaaagtctcgtccatatggaatgctctgaaaagtgctgcagtgactgctttcacctatatgcgcgcacaaattgtgaatcggattattgcaaccagagacaaaatggtcagtttgtggaacgcgataaaaagcaaagtgacatctgtctggaatgctttaaaaagtgcagctgtaacagccttcaactacatgcgggcgcaaatcgtcaatagaattgtagcgacgagagacagagtaataagcctctggaatacagtgaaaagcaaagtgatgtccatttggaacggcattaaaggcgcggcttctacagcatttagttacatgaaagcgcaaatcgtaaaccgtatccaagcaacaaaagaacgtatcgtcagcatttggaatagtgtcatgaaattttttagaggcatcaacctcaagtccattggccgcaacatcatacaaggcttaataaatggtatcagcggcatggcgggtgcattagcgagcaaagttaaatcaatggcaaacgcaattcctaacggcatgaaaaagcttctgggaatccattcaccgtcaagggtaatgcgtgaccaggtcggttatcacgtcggcaccggtatggcggcaggtattgataaatcacagggaaaagtaaaagcggctgcggcaaaagcagcgaaagcggctcagaaggcggctgaggtaaaggtatccaacaaaattaagaacgctgaagtgaagtatgacaccaagaaaatgggcgccgatacgtatatcaaaacattgcagaagattcagaagcaaaacaagctgaccagtgagcaaaaccgaaaaatccagcgcgagatatatcaggcatccaaaagcgcctctgataaacagaagaagctactgaaagagcagcagcgcaaggaagcgaaggcgaaactggcgtataccaagaaagtatcagatcagattaagaaagctgaggcaaaatacgatacaggaaaaatcagcgggaatacctatatcaaaacgcttgagaaaatcaagaagaagaacaagctgaattctgaccagcaaataaaggttcaacgggaaatctatcagactcaaaaagctatgactgataaggccagaaagcagaaggaagccgaaaagaaagcggctgacaaacttaacaagggcattctttctgcaaacaatacttatctctcaaaattcaaaaaagtgaatgataaactgactgccgatattaaggcggccaacgatgcctataaaaaggagctgcaagaccgaactgacgcgatttataacgccatcggtctatttgacgatgtctcaagtcaaaatgtgaacggctccaagctgacttcaaatcttaaaaagcagctggacaagatcaaaacgttcaacactgacattacaaaaatagcaagccgggcaccaaaggcattcacagacgaattgaaagaaatgggtgtcgggtcagctgatcagattaatgcaatagcccgcatgacagattcagagctaaatgagtatgtcagtctgtggaaagaaaagcacaagctggccagtgaccaggctgctcaagaattaaccgggttgaagaacgcgacgaccaagaaaataaatgaattacggtctgccgcaaataaagaactggcacttttgaaaaatgactatctccgcaaaattggggagcttacagtggatgtaaaacagcttggttctctcaagaaaagcggaaaagccatcggttcaaatacaatggccggcattatttctggaatgaagaatatgaagggcgagctggcgaaagaagcaaattccatcgcctcgacaattgaaaaaacgattaagaagaaattgaaaatccattccccatccagattgatgcgggatcaggtcggggtcatggttcctgccggtatcgctgtggggattcagaatggtatcggcactgttcagaaagctatgggcgtcgtcagtgatgccatgactattcagcaggaggatctgaattttgcatatgacacatccatttccagcagcgaactcggcacggttagaaaagaattgagcgcggacatccggaaccttgaattgcctgacaggatgattgttgttgagatggacagcaagaaggtcggtcaaggcgtagaaaaaccggtcacagacgctcagaaaaggtcgaacgcaaggaggacgagatttaattgatcaattatcaggaactgctgcctaatcaatggaaaatcacgtttgacggcattgatatatcacccttcttttatgtgaagtccacgggcggccggggagtgaccggaagagaagtgaatacagccactatcgggaatcgccccggcggtttcctgcggaacacaagaattcctgtaagagtcataaccgttgaggttctttttgctttcagcagtgaagaagagctgaagaaaaagcaggaggaactgacttttattctgcacaccgaagaacctaaaccgttaatttttcacgatgagcctgacagagtctataatgctgtctttgaaagcatttcagaaggcgaagaacagggaggctttcagactgcaacattgacttttatctgtcctgatccaaaaaaatacggcccggcgaaggattttgaatttaattcaggtattcagactatcactaatccgggctatgcggccgtagacccgacaatcgaatgcgtctttgaagagaaagccacttcatatgaagtggctcttcttaatggtgatgggtctgtatcgaaaacgatcaagctgctgtacgatttcatcgctggtgacacacttgtaattgattctgcaaaaagaaaagtcacttgcagcggtaatttaatcatgacagcacttcaaattcaatcagattggtttctgctgccgcctaggacgccagttaaaatcaagttcagtcataagagcagcatcaaatttaatgaggcatatttgtaaggaggtccggtcatggctgacatttatatactttcaccagatgataaattattgacagtgctgtccagccacggacgagaaacctgtacgttctgggatgcgaaatacaaagaagagctcaacaagggctcttctttttcttttgtagccgatgcctcccaccctgatgcgcgcttcctattcgaagagaatcaagtggtattcaaggataaggacggtgtaatgcgtctgtttgtcatcaaggaactggatgatgcagacgaagaaggagaggttaacacccaggttacctgtgaggctgccatgatggagcttgccgaaacatttgtaaaagatttccgcccaactaacaaaactgctcagtttgtactggacaacgtcctttctcggtcaagatgggtggcggaagtaacggcggagcttggagtgaattcgactaccttctataaaaaaacagcgttggattgtattgctgacgtgatcaatatatggggcggagagcttcaggacactatagaatttgatggaaataaggtcgtcaaacgaatcataaaaatacttccccgtcgcggtaaagacagcgggaagcgctttgagagtgataaggatacaacgaatatccggcggactgttatcagttacccggtgacagccctttggggttacggggcatccatagcatctacggatgaggaaggagaggaaacgggcggctattctcgttttattgatttctctgaagtagaatggaaaaaatcaaaaggcgacccggtcgataagcctttaggccaggaatgggttggcgatccggatttattagaacgattggggcgccttaaagatggaaagttgatccatagggaaggccaatacaatgatgaagacataacggagccggaagagcttttaaaggccacatataatcatttgataacgactgcatgtaagacagaaatcaattatgagttgtctgtgcagctgcttgagagcgtgccgggacacgaacacgaacatgtggaattgggagatacaacgatcgcaattgatcgaaacttcgctatcccaatcgagacatcgcagcgcattatttcaatggaatacgatattaccgaccctgaaaatacttgcgttgttgagatcggccaatttttatcagcattacaaaaagacggccggattgatcaaattgaaagcgtgatagaaaaaaaccgcggtacttgggaaagcaaaccggatgccggggaggttacggatggaagtttccctgacaaagccccgccagttccgtcgaatgtagtgatcaaggcaatgtttcagaatgtggccctgacatgggattatgatccgtccagttatattgcagcctatgaggtatatgcttcacaagtaaatggattcactccattaaaagagaatcgtattttcagaggcaaaacaggcggatatgagcattttacgggagtaaatgaagtttggtattatcgcttgcgctcaatcaacacacgaggcacagcgagcgaattcacggatcagttttccgcgaccactcagcgcattttgactgatgacattgttttcggagcgatcacaaaggaaaaactggcccagctggccgttgatgctgataaactttcaagaaactttgatgatgctaatatcttacctggctctcttttaaaatctaaatggttctatgattatacggacaccagccacagtgttgaggaaaaagaatttaatgaaatgactgtttctcagatcatcaatggaacaactagaatagctttcggaatatgcgggaacaggtcatcgcctgttaatattcaaagaatggcattgatcaaagatcaacaatatacactgtcatttgaaataaaacggaataataccaccgacataagttatattcatttgaaaaaaggcagcactttcatacagattagcagcgatgaacagaaagatatttctgcttttccgtctgaccaatttataagggttaatatcaaatttactgctccggaaaccggctctgattacacaattggaatcggcggatataatcgaaacggaaacactgagccctgtagctttgttattcgtaaggtacaggtgcgcaaaggcgatgtcatttctgattatggttatagcccgtttgatactcagctggttgatggtgttattgatggcgaccacctccaaaaggcggtaatagaaacagctcatataaaaaatgcagccataacaagtgcgaaagtagctgaagcggctatcgggacagcggctattcaaaatgcggctatcgcaaaggcgcatctaaaagaagcaataattgattcggtacacatcattgacggttcaataacaaacgccaagatcaaagacctttcagcggacaaaataaatgtcgggacgttaaaaggtatcacgattgagggggtgaccataaaaggggcccgtttcgaggcgctgacacaatcagaagatgccgaatactatatcgaaggcgataagatttaccagtacaccagagactctcattatgtttacaacaaattgattgttagttctgggaaaataacgcaggaacaaggaaagttttttgatcctggtgattcctataatgaaatctacagaacagtttcaattggtgatggcaaaatagagctccgtggcgcaggcaagcaaaccgcatatgaaacggttccaactatttcaatgtattcagaaataggagatgttggacaagttataagccattttaatatgaaaatggaaagacaggcagctgttgaagaagacgcttttcttcttactgctactaccaatcctaaaaatataggagagccgttcacatataaccgttatcaggccctttttgaaggatcagctactatttatcgctttaaaccgaataatttagatattgatgtccccggggtcattcgactgaaatcaggccaaaaaacgattgttgatgcatcagatttaacgctgccattgggaaccaaagttgtagcagggaatgcaaaaaattgcgaattcaaattgatgggtggcaatgtttctacagaattagaagacgagcatggaggcctacaatacggtttgatggtttactgctttacttgggacattaaactgccgcctgacggaggggcaactgcgtacgcgcgctacaatcgcattccttttgttgatagttttgattatgcgcctgagaacgtttttgcggcggtaggtacagcgattggcgcatattctaatgcggttacggtaggattagaaaatataagcgccagttctgttgatattggagtgagagggaccgggactactgccggagttgcgggaaaaacaataaaggttcaaattgttattttttacgaatcacaataagggagtaatttttatggttgaaaaaagggattttaacatgagtctttattatgcggacggcatcgaaatagaagaaaccggcgcgggaattgaaataactgccggctctataaaaaaaggagacaagacatatcccatggaggctgtttcgttcgatctgcagccggacgatacaacaaaagtagcgtatcaattatatgtccttcatgatataaaggctgatgaaataagttatttgctcacaaaaacttatgtagagcctgacggttattatcaagggtacagtgggagcaaaaagcttattatgattccagttcaaattgtcgttgatccacaaggcaaccgagaagggcttataacaatctatgttcaaaataaggaggatggcaaagatgaagcttgagcccgtggtattaaatattgaagcaaaagatagagagaaggaaaagactacagaggaaaagttgcaggaacaagttcttgaccttcagcgggtttgcaatctcttaatgaatcaataaaaggaaacggggggagcccattggagaaccgaagtgctcttttcgggttttttgaggattgctggaaaaacggaactgttttgaccgttgaaatgagaaaagccgttgagaaaggccgcatcacacaagcggaatatgatgaaattacagaaagcgaacgcggtaatgcgtatcccgatcaagagtaaggagtgaaaggcatgcaagaaatgacaaaagagcaacttcaggaccagttacaaatagcagcatataaagctgcttccctacagcaggaattgaatctgaagaacaatgagctggccgaatataaagcgctatacacgtttacagataataaacgcgaggaactcgaaaagcaattaaatgcggcagtagcggcgaaagaaaataatagtgaaccagcacctgtaactgaataggtgtttttattttgcctcgaaggaggtgatcaaaatggagggaatacatgtgtggatgaattttgaaagcttacagatcgcaagaacatatcttttcggggaggtgaagtaccttgacttgcttctaatcctcagcatcttggatgtcatcaccggcattatcaaagcgtggaaaatgaagcagctccggagccgcagcgcgtggtttgggtatgtgcggaagatgctcagttttatggtggtcatcgtcgccaacattattgatacgataacaaatttgaacggcgtcctgacctttggaaccgttcttttttatatcgcaaatgagggcctgtccatcacggagaatttggcgcagatcggcgttaaaattccggccgtcatcactgaccggcttcacgtaattgaaagcgacaacgatcagacaaaagaaaaagatgatcaggcggctggttaatccggctgcttttttgaatccaaaaacagaataggagagattttatgtcagcatacagaaaccaatatattgatattaataaatggacgcggccgggaatcaaaaacaacggcgtgaagaaacttgtggtgcattacacggccaaccccggcgcgcctgctgccaatcattatagatattttggccaaacgctccccgcacagaacagaaatctatctgagaaaaaacagacgtttgcatctgcacatatctttgtcgatcgtacagaggctatttgtatcattccgttgaatgaggttgcctatcatgcgaatgacattcagcaattcgtcaacgggcagccttaccggggtgtcgcggcgctgaaaccgaatgcaaatttcttatctatcggcgtggagctttgcattgaaaagaacggcactttccatccggatacgattgcccgtgcaggacaagtttgtgccgagctgtgcaaaatgtacaaacttgatccaaccaatgatattgttcgacattatgacattacacataaaatttgcccggcgccgtgggtaagcaactctcaagggtttgccgattttaagagccgtgttgaaaagcgaatggatggtgtggttgtaacggcgcctgtatcaaatccggatgttacccatacagacacaggaagattcatcaaaaacacggtggtttcaagcgatggccttgttttacgtacacaacggagcgcctcttcttccatggtgcttaacctgccgaatggcacggttgtaaaatatcagcttggatcaactgtcaacggatggggatatgttgaatacaccaattctaaaggccagacattccacggatatgtgaatgtctcatatatcaaaagcgataacgagctgaaaagcggcggccaaaagaaggtaaaagcctcaaagcctaaaaccactcaaaaatcaaaattcagtctgcctgcgggtgtttttaaagtgacaagcccattgacccgaggggaggccgtaaaacagattcaaaccgcgctggcggctcttcattattaccccgataagagcgcaaagaacttcggaattgacggctcatatggcgcgaaaacagcaaatgcagtcaaacggttccagtctatgtacgggctgcctgctgatggcatttatgggccgaaaacaaaagcgaaacttgaaaaattattgaagtgatatagcctcgtccaatggacgaggctttttttgttgtaaatgggagaaatacataacttttaagctagtatgaagtcaaaaaatatacttttattggtgaatatatggtaaattcttttatgtgtgttatttctaatgaaatgagggaatttaattggacgaattaaaagaaaaaagaacagggacggttgcccagccattaccacaaccagcagttgacgaacagcttaaatcagcattccaaatcatgacatctgtggtgaacgattcgaatcgaacgtttaattctgaaagaaaacttgataatgtagctatttttgttgattatgataacgtttactggtctctaatgaataattatagccatgatccagattatcaatctgaagataaaaatttattttcaaggttatgggaacgatacggtcaagacaatgtacgttcatttagagtgtatgcggattttaacaaattaagaagtaatatgacaagtcttcaaaaaaagcgtgttcaaataaggcatgtttattcaaatggaaaagatggggatcatcgtaaaaatgcatcagatattgaactttgtattgatgctattgaaaatacatacaaggatccttcgattagttgttatgtttttgtaacagctgatagtgacatgattcctattatgagtagattaatgtacaagggaaaaagagttgagctttattattcagctaaaaacgctcctaaacatattgaatttaagaattatgctcatcatgctgaagatttggcgagtttacttggtattgaagaaaagcagtatgaccgagataaacttatgaatcaaattcttgttgagataaagaaatggcacgatagctttggtacacaaggagatctgttcttaggcttgagttggttcaaaagatatctaataaatacattatcgaccccagcagagattattagtgagattttagaggaacttaaacaaaagagctttattgttgaagagacaaaagtgttaagcaaaggtaaattaaagggcagttccaaaaatcaaatcttatgttctgaattagggttagctaaaataactgaatcagaagatcaagcacaagttgtaaaataattgcttttttgcttgacaggaaatatatattggatgtattatgaatacacattagaaaacacatacgctattattactattcgctacatattcgctaaagaaagcagggagataccctgctttcttttttatttaaaattccacctgtttttatgcttatcccacttcaaaatgcgctgcctcatcaaattcttcacagcagcacggatcgtctgctcatctttcccggttttccttttcaattgttccatggagggatttttcccgaagcgggtcatattaaaaataatccgatacactttacgctcaaaatcggtcattgtgtttcatctccttggagacgattataaagaacgtgtgttcgcgatgcaaacaaacctgttattttttaaaaaataacacaaaaataacgaaagttgcgtcagggtctgaaacaatgcggtttttgtttcttttccattcatgatcacactaaaaaaataacaccgattgaaagggtgcgaaagcgagcgaaaaccgtggtaattatgggcggcatgatgtaatctcccttgggtataccaagggattgactgttgagttcacttgaaatgctcatagcgttctatcagaaaggtcttatcagttactcaactagataagaccttttttgtttataaaaaagagaaggtatgagatcgtttgtctaagattgacctcacactttcctaactacaatgtgatttcctcatttccttcaagcaccattctcagctgctccacctcaccccgaatcccaatcccaggctcccacgaatcaatcagacgaatggccttctgattcgattccatcgctttcgtattttctcctttacgatacaacagctgtgccattccgtaatagtaatagatcaactcaacttgattggcgttgtgtttgtcatagagcatttgttcaaaggctttttccgctttttcgagttgatcacacttgacgtaagccatgcccaggttgaaataggcttctatcgttttttcgccgccgtatgcggcgctggttgtgtttgccgcttcgtataatgtgatggcttcttcgtagtgagagcgggcgaaactcaggtcgccgcggaccagaagaaccctgtgccggataatgggggagacgggctgatctttgatgccgtccagcattgctgccgctttgtccggttctccggtttttaacagcagcctcgattgcagggcgattccccatactttcaagtcgtcgtgatccggcgcgcctgattgttcgagtatcttcaggccggcttctatttgcctgagggcttcgtccgcatcattaacttccatcagcgcccagcctgccgtgtcgatcctgaagtaggcttcccgcgtgtgttcgcctgattgacgggcggcatcggcggcttttaatccgtattcgattcgcaggggcaggttgattctgcttagaaaatggctgatgcggatgatgagtttgatcaggatgtcatgttgtccggtttcactcgaccattcgatgacctttaggatgttcggccattcctttttcatttgctctaaattccgtcccagcagatagctccaatagacagaattgggctgttcccgctttatatgggtttccgcataatcgatataataatgcgcccagcggctgcgggctcctttttcaaattcgtgattttcggataagtgctgttctccgtaagcgacaacggtttgatgggctgcgtattgaattcttccttcgcttcgttccggctgtattaaagcatatgaccgcatttgctcaatcgcgtaatgaaaccgccggacgtctaatccggccgcttgagccaagcttttttcatcagggggcttagcgaaaaagcaaagcgtctgccatagtttccgtgtgtcttcatgacatctgtcccatgtgcggccaaagagaacctcaaacaattccaataatgagtagcccgcttgtttaagttcttgaatgagctggggagcggggatgtcgtcgtctgacatgtatgcaatgctcagtgccatggccttcgggttgccggcggctgccgagacgaattcattcttaaggtcaggcgatagccgccgcagctgctccagcttttcccgtttttgcgggaggttgcatgtttgcagacagcggtgcacttcttgatggaaaaattcaagggcatccgtttgttcaaggccgctcagctggatggccgccagttccccgaggccgtcccggtatgtctgttttacgttttcccgtgccgtaaggagaacttttacgccttccggaagaccgatgataaattcgtgaatgtcacgttccgctgtatcgatgctgtcaacgatcagcagcacgggtttttcgtttgaatgagcggctaatgcattacggacgacgaaccgtttttcgttgatggatttgtctatttgttctgcgcgtccgagctgataggcgatcgtgtttaaaaaatcgctgaagctcaatcctttccagtcagcgctgatccaaatgatgctgttgaatgcaggccaatctggtgaaccgccggcacaaaggtaggctgcttcaagagcgattgtggtttttcccatgccggcccagcctgtgattaaacagaccggtgacggagacagcatccattgccggatcgcctctatatcaaagccgcgtccgataaagttcccggtccggcgtgacggtaagttatgcgtgacgggctgttctgtaagcgcattcgtttcatggccgggtctgtcatgaaacagccgctttactgctttttcaacatcttcatcactcggcgctccgaatgatccgtctttccggtgtatttttgctttttttagacaagacgccgtccaaacgggcaatgcgggtttgatgacgggaatggtggtggtttccagaaggccggtcagccattcagtatccatgtcagtcttttcgataatgatccagatcatgccgaacagctttccgtcgtcaattcgtccgggaatgtagtttgcgcccatctgtccgatccagcttttgatcgtgttagaggaaacgcctaatcggagtgcgatttgatcgatataagactgtcctgttttttcgttctttttccttctgactttataatcaggatgaagtttcagcgatttgacggcaggtgccagcagttctgcaaattgtgtccggttttctagttcagccattagcctgcacctcctattagtactattttatcaattcagtgttttttgtatatgaaaaaataaaaagtacagtgcggctgtccttttatacagcaggaaaggctgttgaacgtatggaaaagcagataaaataggggcagtaacagagaaaacaaaaatgtatgcacttacatttcaaagcagagaaaggattttgccaaatgactcacacagtgcctcaaaacatgaaagcggcggttatgcacagcacgagagaaatcaaaatcgaaacattgcccgtgcctgacatcaatcatgatgaagtgttgattaaggtgatggctgtcggaatttgcggatctgatctgcattactatacaaatggcagaatcggcaattatgtagtggaaaaaccatttatcctcggtcatgaatgcgcgggagaaattgccgccgtcggatcgtctgtcgatcaatttaaaataggagaccgggtcgccgtcgaacccggtgtcacatgcgggcgctgtgaagcgtgcaaagaagggcgttataatctttgcccggatgtacagtttttggcgacaccgccggttgacggcgcgtttgtccaatatatcaaaatgcgccaggactttgttttttcgattccggattcactttcctatgaagatgcggctttgatcgaaccgttttctgtcggcattcatgcggccgcgagaacgaagcttcagcccggttccacggttgcgatcatgggcatgggtcctgtggggctgatggccgttgcggcagcgaaagcatacggggcaggcacaatcattgtgaccgacttggagccgctgcggttagatgccgcgaaaaaaatgggcgcgacgcatgtcatcaatgtccgggaacaggatgccggtgaagaaatcaaaacgatcacgaatggcagaggcgttgatgctgcctgggaaacagcggggaatccggcagcattgcaatccgcactggcttccgtgcgccggggcggaaaactggcgattgtcggtttgccttctcagaacgagattccgctcaatgtgccgtttattgcagataacgagattgatatatacggaatcttccgttatgcgaatacgtatccgaagggaattgaatttctcgcttccggcatagtggacacgaagcatcttgtaacggaccaatatccgctggagaagacgcaagaggcgatggaacgcgcctttcaatacaaaaatgaatgcctaaaagtgatggtgtatccaaatcgctgagtgaacggggaggatctttgcattctccctcttgcttatcaaaaatgaaaacggattcttggggtgggaaatgatgattgaaacagaaaaagcatcggcagtaaagacgaaacatcgcggcctgtcctggatggaacggatcggctacggattcggcgatatgtcgtacaatattatctttcagtttgtaaacgcatacttattattctactatacagatgtcggcggcattaagcctgcggtcatcgcagctttgtttcttatcgtaagggtgctggacgctatttttgacccgattatgggcgtgattctagacaagacgaatacaagatggggaaaggcaaggccgtatcttttgtgggtggcgtttccttttgcgttatttacgttcttatgctttacgactcctcatttcggcgagacagggaacatggtttatgcgtacatcacttatattctgcttgggatgtccttcagcatgcagacgattccggtcaacagcttaacgggtcggatgacgaattctgtggaggaacggacggttctgacgacgacccggatgattttggtttatatcggaattctgttatcgatttcctgtgcgacaccgcttgcggacgccatcggcgggaaagatcaggcgttcggattccagatgacggcgcttatctatgcggcggtgagcatcgcattgaatctgttcagcttctttaccgtgcgggaacggattcagcctgaaaaaagaaaaaaacaaggaatgaaaaagacgttgtctgttttgttccgaaacaagcctttgctcattttggtttcttcatttttagcttttgcgatcgggtttaacattaagctcagcacgatggtgtactattttacgtataacgtcagccataaggaatttgtgtttttaggaaccgtgctgtttttcggcgcagcgctgatcagcaatctgtttattcctttcttttctaagaagcggggccggaagcaggtcatgatcatcacggcggcgttatcgctgatttcttatgcgggccttcagtttacatcgtattcctcgattccccttattttcttttggcttttcgtttcgggatttttcacgacgcctttaaatacgcttgcttggggaatggttgccgattgtgtcgattatgcggaatggaaaaccggagtccgggctgatggcgtggtgatttcgagcatgagtttcatcaataagctcggagttgcgttagcggggtcattttcggccgtttatctcggaatcgccggatatgccgcgaataccgatcagaccgcctcgtcattgaatgcgattaaaaatatgaatgcgctcattccgggattgttcattctgctgtctattattcttatttctttttatcctttaactgaaaaaaaatatcagcagatgatgtctgatctggagcaaagggctgccagataagtatacgtaaaatttaaaatattctatgtaaacggttgtatttatgacagaaagcactatactgaaactataatcgagaattgataaatgagtgtgataatgtgggaaggcaatctgttatttgtattggagaattgttaattgatttcttttgtaccgatgtggatgttgatttgacggaagggcgcaatttcttaaaaagtgccggcggcgcaccggcgaatgtgtcggcagccattgctaagctgggcggagacgcggctttcagcgggaaaacaggcaaagatccgttcgggtactttctgaagcagacattggacgccgtacatgtcgatacgtctatgctcgtcatggatgagaaagcgcctacaacgcttgcgtttgtttcattaaaacaaaacggggagcgcgactttgtgtttaacagaggagcggacgctttgtttacgcttgatgatattgatctggaaaaggtaaacgatgcgaaaatccttcatttcggatcagcgacggcattgttatctgatccgttttgctcggcctatttacggctgatgtcgattgcgaaagacaatggacagtttatttccttcgatcctaactaccgtgaggatttatggaaaggaagagtttcagagtttataaacaccgcaaaaaaagccattgccgtaagtgattttgtgaaagtcagtgacgaagagcttgagatcatcagcggtgcgaaggatcataaagaaggcgttgcggttcttcatgagcttggggccggtattgtggcggtgacactagggaaaagcgggacccttctttcaaatgggaaggatattgacatcattccgagcattccggtgacatcaatagactcaacgggagcgggcgatgcgtttgtcggcgcggcgctgtatcagctggcgcgcacggatgaggttcagacggcagccgaagattttgcgaagctgcgtgatattgtctcatttgccaataaagcgggggcgctcgtgtgcaccaaaatcggtgcgattgatgctttgccgagcttaaaagaggttgaagtatcactgtaaagtatggaggatgtttcttgaaagtcatcggacttcgggaagcatcctctttatttaggtctgaaacccttttcgatatacggtatactttagaaaggcatccagtaaattgaaccgctgtgaagtacatacaataatgtttttatcagttctgagtaaaaccaagtttctgctgctgccgtcatgtacagtgtgacggcctgtgatattgaaccgcggaggaatttttttatgaaacatgtttttcttattgtgcaatgcgcgttttctgttttttgttttctttgtctcgccgctgtcaattggtatcaggggagtgagcttgtttctgactcgtttgattggaatgatacggctaaattctcaaagcttttgaatgggacggatacgattacaagtccggaacagatttcgcagctggatttctttgtgtatgcggcgaagcattatccgttagtgagcgggttgatgatcgggctgtttgtttattctttgttctcactgtatctgctcgtgaagaatttccgccggcacaaatgggctgaatgagactattttcatataaaaatacataaattcaagagaaaatgaaacctttttcgaaaaaaacagtatatataactgtgaacttgttactatttaattttgggaggaaaatgaaaaatgagtattttaggaagatttaaagacattatgtcaagcaatatcaatgcgctgctggataaagctgaaaaccctgaaaaaatggttgatcaatatttacggaatctgaacagtgatttaggaaaagtgaaagcggagacggcttctgtcatggctgaggaacagcgggcgaaaagagcattaacagaatgccaggctgatgccgaaaagatggaaagttacgcgatgaaagcgttgcaggccggcaatgaagccgatgcgcggacatttttggaaaggaaaacggctgttgaatcaagactgactgagctgcaaacggcttatcagctcgcttcttccaacgcgtctcaaatgcgcaaaatgcatgacaagcttgtcgctgatatcggagagcttgagtcgcgaagaaatgccatcaaagcgaagtggtctgtggcaaaaacgcaggagagaatgaacaaattggggtcctctgtgtcaaatgcgggccaatcgctgacagctttcggcagaatggaagacaaggtcaaccgggcgcttgatcacgccaatgcgatggctgagctcaacgcgtctccgaaagacgatattgacgagctgacggctaaatatgacagcaatcaaagcagtgtcgacgatgagttggcggcgcttaagcagaaaatgcttttcagtaaagatcaatagacagcgggctgcagctttgtccgatataaagagaaagtgagagaaacagaatgatcatttcttataaatgcccgaactgcggcgatgatatggtctttgacagttcatccggcatgctgacatgtcacagctgcgggcggcaggatcagattgaaagcctgccaaaagagtatataacaacgagattttccgaaaatgaggcgaacgagtaccgctgtgagaactgcggcgcggtattaatgactgaggcggaaacgacggccacgacgtgcgggttttgcggaggagccgccgttctcgccgaccgattatcgggaaatctcgcgccttcgatggtgattccttttacgatcagtaaagaagaagccatgagcgcttttaaaaagtggtgccgaaacggccgtctgacaccgaaaggatttatgactgccgatcgggtgaagagcataaccggcatgtacgtgccgttttggatgtttgacttaaacagcaaggttcaggtcaatgccgtttgtacgagagtgcatcactatgaagatggagaataccgggtgacggagaccgagtattacaacgcgtaccgcgatatcaatcttgattatctcaaaattccggtcgacgcttcagaaaaaatgaatgatgaattaatggacaaattggagccttactcatacagtgagctgaaggagtttaatacggcctatttagcgggatatatagcggaaaagtacaattataccgatgacgatctctttccgcgggcgaaggataaaatcagccattatattgattcttatatcagatccaccttctccgggtatacgacggctgacattacggatgagcagattcagaccgataaaatcagcagcttttacgtactgcttccggtctggatggtcagctacgactatgagcgggctgagcacatttttgcgatgaacgggcagacgggcaaggttgtcggcaaaccgccgatcagtgccggaaaagtggccgcgtggttcggcggcataaccgccggtgcgtttttagcattaagactcgtctcacttatgataggaggcggtttttgatgaaagtatcgataaaaaaagcgtgtctcttctgcttcgtcctttttctgatgctgtctttttctttacatacatcggcgtctgccgcggaacagaagcaatatgtttatgacaatgctcatttattaacgaaggatgaaacgaagaaacttgaggaattggccgggaagctgggagaaaagcgccataccgattttatcattcttaccgcaaacggaacgggcggtaaggagatcgaacagtatgccggtgatttttatgacagtcattttagcggaagcacggcgatattgactattgatatgaaggatcgggaagtatttctctccggatataaaaaggcggagacgtatttgaacagcagccggctgaatacgatcagaaatacgatctcgtcagatatttccgcaggccattatgaaaaggcgtttcagacttacatcaagatggcttataaagatatggggaaaagcccggacgacaggtctgacaatctgctgctcacatggtggtttcagctgattatcgctgcagcagcggccggaatcgccgtcaccgtgatggtgtacaattccggcggcaaggtcaccgtcaccggcagcacgtatatggatcacgatacgtctgaagtgctgagccagcacgacacatatatccgaaccgacattacaagagaaaaaaagccagataaagataatgacaatgacggcggagtcacgaggggcggcacgagttacagcggaagcaagggaagtttttaaattatatgtaaaggatttgagcatacatgggttttttcagaaatcagttagcaaatgtggtggaatgggaagaattcagagacgacatggttttctataaatggaacaaccgtgaaattaaaaaaggcagccgtctgatcatccggccgggacaggatgccatctttttatacaacgggaagattgaagggattttccgtgatgacggcgattatgatatcgaatcagaaatcattccgtttctatcgacactaaaagggtttaagtttggctttaacagcggcatgcgggcggaagtgctgtttgtgaatacgaaggagttcaccgtgaagtggggcacaaaaaacgccatcaacattccggcggcaggtatgccgggcggtatgccgatccgcgcaaacggcacatttaacttcaaggtcattgactacatcggattgattgataagattgcgggtgtcagagacagctatttagtagaggacattaaaatccggattacgtctattctcgatcagcttttgatgaaatggatcaccagagaaggaaaagacatgttcaatctgcagtcgaattcatttgaaatcggaaaagggattcaagaagatcttgatatgcagctgatcggagacggcatgtcgattacgggcttcaatattatgagctttaactatccgcaggaagttcaggatatgattacgaaaaacgcttcttacggcatggtgggcgatgtgaaccgctatcagcagatttccatgacggacggcatgtcatccggcaaaatgagcggaagcggcgccgcctcagacatggcgggcatgatgatgggaatgaatgtggcaaatcaaatgatgaaccaaatgaatcaaaatcagcagaaccagccgcagcaaaatcaaagtcagcagaatcaggggaccgaacaggcaaacggctcggaaggagcggctaagccgaaattctgtccgaactgcggaacgaaaacggaaggcgcgaatttttgcccgaattgcggacagaaacttgcctgatgatatacgaaaaagaggcctttttggggcctctttttttgtcatgatttcattgtttgaacgatgagggatgtcagcgcttttgatccctcaggtatgagatggacgccgtccggtgtgaagtattcagggtgctgcaatgcttttgcgtgccaatcgacaagcgtcacatttttgcgtgactcggcctgccggcgcaatgattcgtttactttgctttcccactgccgcggtacacgcgtgttgacaagatagatatcggcttttgaaaaggagctgatcagtgattcaatttggctgtttgtgaaatagccattcgtccctaactcgatgatgaccgctttgttcggctgattaaatgacgcatattccgaagtgagctggagtgcttgagagacttgtcttcctacctttccgtcgatggtgacatgagggagggactgccgcaggtatgacgcaatgtccagcatcaccgagtcaccgatggccagcacgtcttgctgaggctgtgtttgttttggatcagccgttttttgagatgaccgttcctttttctcgtcgtttttcttcgtatctgatttgtctgctggttctttcttgtttttgtctgacgcggtatccgttttttcgccgccgtgttttttcttgctgtcttcttcttttgcaggctgatcgtgatcggccgttttgtgcgaagaggcggcggtttcttgctgatcattctgcgcgtacgtccattgcggctgttttttctcttcggctatccctgacagcccgcccgcaaatacgagaatggcggcaagaatgaggccgagcgacattctgctgatgacagaggacgtcttccattccagaaagcggttcagaaacacgcggcgtaaaaatggccggaagcccgcagtgcggatcggctgttcaatgaaatggtaagatagctcggcaagaatgaaagtggcgccgattctgacggcgcagtgccaataaaccggatttccgatttcctgcacgggtgtgctcagtacgaaaaccgggtaatgccaaaggtagattccgtatgatctcgttccgatccagcgaagcggcttccatgaaaggacatgtcccaaaaagctgctcggatggcataaacatgcgacaagaaccgctgcggtgatgctgatcaaaagcatgccgcccttgtacaggaagggttcatattcatccgtgtaaaagacgcaaagcagcagcgcggcaaaagcggcaagctccgtcccgtgaagcaggtgtttcatgctgctcggcagccgtttggaagataatcgtttcatcggccacactaaagctaaagcgcagccgatcagcaattcaaatgaccgggtatccgtcccgtaataaacgcggctcggatctccgccgggcacatacatcatactcattacgactgccgaacataacgcgaggaacatgaccgcggccgcaagccgggcccgtgttttacatatgtacattcccgcaagcagcaggaagggccatatgatataaaactgttcttcaatcgccagcgaccaaaggttttttaatggcgaaggggagccgaagctgtcgaaataagaaagttgatgaaagataaaccaccaattgcttatgtaaaaaagtgaggagaccgcatctccgcgtacggtatgcaggagctcgctgttaaacaatacgacccaaatgaccgtcatgataatcatcagataagccgccggcagaagccgtctgatccggcgcacccaaaaatcacgcaaatcaagggtgatggcattgccttggacaggcaatataatagatgtaattaaataccccgataaaacaaaaaagatatcaacaccaatgaaaccgccgtcggcccagttaaaattcagatgatatgcgataactgcgaggacggcaaaggcgcgaagtccatccagtccgggaatatagcggtgatgcagtgacttgtctgacatggtattcctccaataatgtgtgcggaaattctcgctgttttgcggatagctatagctgatttctgtacagtcttccatttgttccgttaattagacgcattcggaaggggattttgtttcagaaaaaatgtatgaaatgctgtgattttcttaaacttttcagtcccagtccggcgtctgttatatgaaaagggtcccttatgcatcttggctgttgcgggacgaaagaaaaaatccatgatctgcggatatcatggatttttttctttctttatctgatgtagcggtctccgacaagcagcttggagatgacggaggtcggtattgtaaactctgtaacgcccatatatccgggtgccgcttcgtattcatcaaatgaaataacaagtttgtgcttatctgtaatataaaaattctggtcggcgcggatggctttaaaaggctccgtcatatcatcttcttcgacccagtatattttattcggatcttctttcatctgttttttcatttgttctttaatattttcgctgatgactttaatataacggtcatctttaaataaactctttaacgtaagcacggcctcattctttttatcaatcgtgatgtaacggctttgcgtataagatgaagcttgcgttttttcgatatcacggcggattgagatcagatccgctgtgtcagtaacggtttcataatcgctgtaaatactgaggtggccttttttgctttttgaggtcgccttcataaattcctgatacagctctttgctttctttcatataatgccggttgatgctgtcttcgagtttatgatcggaaagtccggacagagcgggcgttttcacatcaatgcttgattggttcttttcttccttcatctccgtgaatgtgatggcttggacgactttgccgatgacggggattttagacatggcttgtgcggcatccgggttgatattgacaacggcggtaaataagacggccgcagcgactgccgcggatgtcggccacatcacgattcgttttttcttcggtttttgctgaagggctttttcgacaatgctgtccagttccttaggaatgggcacacttttatactcttctcttaattgttctaatctcttttccattaagaaagatcctccttcgtcagctgaatgcgcatgagcttcagccccctgtaaaggcgtgttttgacggtgttgatgttttcccccgtgatgtccgcgatttcttctaatttcaggtcttcaaagaaacgcagaatgataatggttttatattgatgcggcaggtcatcaagcgcttcgtgaaggtctgtgtccttgtagtgatcttcctttcctcggcttaaaaactcgatcgtttcatcatccatcactttcagttttttctgtttgcggagaaaatcaatggccgtgcgcactaaaattttataaaaccagcttttgatcacatcggggtttttgacggattcgaccgatgtcagcgctttttgaattgattcctgaacaatatctaacgcgtcatccttgttttttacgtaactgtacgcaagccggtaaaagtcttccttgcgctcagttatgcacgtcacaagcgacgctttggctgtttcgttcttcattgcttcaaagggctcctttttaaaaaatacgtatcataggctgctgcctaaggatagacgggacagggtgaaaaatagtttgcgcagaggggatcatttttaaaaggaaaaggaaggaaagacgatgagatgaaaaaaagagccggaacggctctttttcggatgtgtctgatattcagctgaacggtttagttcggtttgactaagattttcacttggtttttctctttgattaaagcgccgaagccttcttcaatcagatcgtcgagcacgatttttttcgtgacgagcttatctgctgagaagtagccctctttcatcagtgcaagaacggaagggaagatgtcacggtatccgataatcccttttacggtccgttctttgatgacgatatcgttcggatgaatttccgctcctttttcccagatgctgacgataaccgtttcaccggcaatgtttgttgactggatcgcctggcggagaacgacaggaacgcccgttacttcataagaaacatcaacgccgccgtttgtgcgtttagcgatttcttcaacgacatcgtccgtttttgacggatcaatgatgatagcgccgagttctttcgctttttcctgacgttccggtgaaagttcaaccgcgtaaatatctgtggcgccggccgctttcagggcttcaatcacaagcagcccgatcggtccgcagccaaaaactgccgccttgtcgcccgcttttaatttgctttggcggacggcgtaaagcgctaccgctgacggctcaacaagcgcgccctgttcgtaagaaagctcttcaggaagcttaaacagcaattcttcgtcaacggatacatattcagaaaatccgccgccgcctccggctaagcctaagaatcccatttgttcatcaaggttataggctccctgatgtccgtgtgtggcaaaaatcggttccacgacgacacggtcgccgacgctgtaatttttgacgccttcgcccacttccacgacttctcctgagaattcgtgacccatcgtgacgggcgccatttcgtttgttaacggatgaggttcgccgaccggaataaagatcgggcctcccaaatattcatgaaggtcgcttccgcaaatcccgcaccatttgactttaattttgactttacccggttctgctttaggttcatcaatgttttcgattcgaatgtctttttgattgtgccatcttgccgctttcattgattatcactcctagtctgattgaaacgagtataggtacatgatcaatatgaaccacggttaaaaggaataaagtgcttcctaaagcctgatttctcaaaatatatcatattatgcaactatcaataggccttataaaaagtccatattgaatgcagaaatactctatgaatattataacgctaatgaattaaattttgtagtataatttaccatggaattatatagaacaggtaattgtgccgtcgttatgtgcatgtctcatcacgttgtaatgaacatgtaaagtgattgaaatattataatcgtcttcttggtgtataattttgcctagaataaagaatcaggaggacgaaagcttgaagaagttattcttagccttattgattttagcaggaagcacgctgggagcgatcagtttctcttctgatgcaagtgctaaaaaagtgaacggaaatattacatggtataatggagtcggtaaaaaaggatcttccggtaaaaaactgggacactgggattgcgcgacaaaattaggatttgacgttccgagaaacggaacgaaaatcagagcttatgcgaaagcaaaaccaaaaaaggttatcacagtatataaaaatgatgtaggccgtctgccgaatgccgtattggatgtcagcccgaaagcgttcaaagcgctcggatatccgttaagcaaaggaagagtatccggacactacagctattaaaatagaccatcttaaaaagcaaggactctgattcttgctttttctgattgacggagagattgataatgaagaagaaacgatggatctggatgttgcttgccgccgttttggcggcggcggtcatcgcgtccgttttactgatcaaaggaaaaagcgacggcggcggaaaagccgttgtctccggcggccatgacaagctgcttgtttccattacagacaaagatctgatgacgaaatattacgaggacggccgcgtgctgtacgaggaaaagctttcggcatatccggcgtttgcgctggatgacgcccatcaggtgctctattttgtcgggaataatgacgaaaatgagatgcgtctgtataagcttgatctgaagacgaaaaagaagacggtgctttataaaggaacggcaagcgctgacagtctgtttttatcaaaggatctgacgcacatttatttccgtctcggaaaagcggatgaagatattttccgtctcgcatcttttgatttgaaaacgaaacgttatgaaaatctgtatcctgccgccgatgagaaagacgacagtgtaagcagcttcttttataaccgcagccaaaacgattttgcgcttctgcattattccgtcaaagaggattatcaaaaaacggatgaggcaaatgagaaggggattgaccctgaaccgacgaatatccggtttgcagcaggagctggcgaacaccttcaggacctgacaaaccttgaacagtttatcagcggcgtggcggtgtcaccggacggaaagaaccttgtctttacatcttatacacaaaaagggacggaacaaaaagcgtccatccgtctgatgaatgtcaaaacgaaaaaagataaaacgattatctcaaacgggaaggacttcgctccgctgattgatgcccagcctcagttttctaaagacggcagcatcatttatttcatggcggaagcaaaaggcgctaagcgtctgaaggatgaaacggggcggaatgcgaaggtccggaccatttatgcttatcatttggatacgaaaaaatgcgaaaaagtctgggaaaatgaccacggcattatcaatagtttttccgtcatccaatcatgaaaaaaacactcagcgcccgctgggtgttttttcatgaacaaagctggctgcggctgaggcgagccatttgaaaaaacggagaatcggaacggcaaaatgaagcgtttcgatgaatgactgtgcggcaaggttcattttccgccgttttgccatttccttcagatctttctgctgccgatcgtttttcatgttcattgctcctttgcatcataaaaggacatgataacgcaaaggcctctcatgagacatggaggccttctctatgttgagactcgtaaaagggaggtctaacttgatgccgtttgattattgttttggagatttaccaacgaacggacgccgtcgatcattttactgccgcaaagggggcaagtcggggtatcactgccggcaaaattctttctgctccagccgatacagtcctcttttgtgcattcccacgtactgacatcttctttaggcagcggttcctgattacgtttgttgtagtaagacataaagtcacttcttcccttatgaattttcgtgcactccttcattgtctcatacttttccctaatctcctaattcctttttctatccagatttccaatgagggtgcatcgtcttcctgttattacagtatatgcaaaaaagcgccttcttattttttctttttggataaataaaaaaagccccttctggagaaagggggggatgtttgtttactgcttatccgtgacgtccatcggtctcatcatgtcgtaatcttcgtgctctaaaatatgacagtgccatacgtagcgtccgctgtaaggagcgaaagtcgccgcgattctgatgacttcccccgagtgcgcctgcacggtgtctttccagcctttttcacttggaggaggcgggacggcggggcctgtatacacaatgtcgccgaatttgttataacgctctaagtcaaagggacgccggtcaaggatttggaaggaaacaaggtgcaggtgtatcggatgggttccccccatcggattgataatcgaccagatttccgttgcgccgagcttcggcgcttctgtcacaggatcatgccatcgcttgttattcagcgtcaaaacgggccggccgtatttgtcttgcgtatttgtgagtttcagtgtcctgatgttgtgtattctttttgatgttacattaggcattgttgaaagatatttaggcttccggcttgtgtcttctcccttcagcggttttgtgacgcggaattgcatcacattggcgtctgtatccggatcgacgtcgcccccgcagccggtgccgttcgttaaaatgatatgttctccgtcaaaggcggagaaatcgatgagcacatcataccgctcggccggggctaagctgatagattgtgttttgacagagcggggaagcagtccgccgtcagaaccgatttggataaacttcccgccgttattgagcgagagagaaaatgttctcgtattggaggcattaaggatgcggaaacgatatgtccgcggttcaacttccatatacggccacgctttaccattgacgagaatggtatttccgcaaaaaaacgggacgatggaagggtcgggcagcgtttcggaaggattagcaggtccgcttggataagacaaggaaccgtcgtcatttaacgtgcggtccaaaatcataagcggtacgtcgtactctccggagggaagcttcagctgcttttcttttcgctcgcggatgatatacatcccggcaagcccggcgtacacattgagcctcgtaatcgccatggcgtgatcgtgataccataacagagccccgcgctgtttgtttggataatggtatacctctttctcaaaataaggacccgtttccttaaaatcctttgtgaaccaggcttctgggtagccgtcgctgtccggcggcgttgctcctccgtgtaaatggacgacggttttgacatcgggttcctgatggccgctttctgaatggtgaatggtatgatccacgggcagaaaatgcttatccggcaggtcattcatccatttaatatagacgttttcatctttgttcacgtcgatcgtcgggccgggaaacaaaccgttatacccccaaagccgggtcggcgggagatcgcggtgcagcttgtgaaagcattccttcatggtgacttcgtaatacgtgctgccgtctgatttcttctgcggctggagtgtttcgataatcggcagttcatctgcaaatttttctagtgccatttttcatcctgtccttatcatttattgaaatcctgtactacagttaatgctgcctggaacaggttggttaaaaaaacacccgcccttttttgagggggggtgtttgcggttattgcgcaacccggctttcggaagcgctctctttcggtttttgttttttgcggaatacatatgaggcaagtaccagcagagtaataaatcctgtcagcagaaattcagaccgcattgaactgataaacagcatagataacaagatggcgcaaatggcgatgatcgtcaggtaggttaagtacggatagaaccacattttgattttaagagattcagggtttgtccgttcgattttctttctcattctcagatgtgagacggcgatgacgagatagacgagcagtgcgatcgcccctgatgaattgaccaggaacaaaaatacggagtctggagaaaagtagttcataacaacggcaatgtaggaaaaaaaggtgccggcgataatggcttgaaccggtacgcctcttttactcagtttcataaaacgccgcggcgcttcatttcgctctgccagtgaatacagcatccgtgacgtcgtataaagcccggagttcaggcaggacagaacggctgtcaggacgatgaaattcatgatttgagcggctgcgggaaccccgatatggctcaaaacggcaacgaaggggctttccaaaatattggctgaatcccatggcagcagtgtgaccacaaccgcaatggagccgacgtaaaaaataatgatccgccaaacgactgagcgggtcgcctttgtgacggattcgaccggatttgacgtttctcccgctgcgattgcgacgatttcagatcccatgaaagaaaaaatgacaacgacgatgccgagcagaacggaacttggacctttagggaaaaatccgccgctgcccgccaaattttccagcccgaccggcttgctgccgggaacgattccgaaaatgaacgcaaatcccgcgattaagaagacaacgatcgtcgctaccttcactaaggaaagccagtattcaaattcgccgaacgatttaactgaataaatattcgtcagtgttaacagcacggtcagaagcagactcgtcagccataacggaatgcccgggaaccagtactgtatgattccggcgcctgcaatggcttcaatggcaatgacgatgacccagaaaaaccaatacagccatccgatcgtaaaaccggcccaaggaccgatggcgtcatgcgcgtactgtgaaaacgaaccgcttgtcgggttgacggaggacatttcccccagcattctcataataaaaatcactaataatcctgctaaagcgtaggagacaatcgctccgggtccggtggaatgaatgactgatccgcttccgacaaataatccggcgccgatcacgccggcaattgaaatcatggtcatatgccgggtttttaatcccttagataaagagttaggctgattcattctttgcctccttttggtttgtttatgctgaatattcagacaagtattattctatcataaatgccacagacagttgaaaatgatgtaagaaaatatgacatttttttcgcattcgtacagcagaaggcgccgggatgaaagaggaacatgccattgaccattcacacgttcatatggagcctctccagctgaaataaagcttcctttctaaagggagcttttttcctttttcggactggaaacaattcgctggaaacgtttttttatactgtttatattttgtggtaaagttaggttacgataattgaaatttgagagatgactaggaggagaagaatggcttataaagaagagctgcatccgctgctggagaaagccgttgagcatattgaaaacatcatcataggaaaacgggatatcgccatactcagtctggccgccattctcgcaaaagggcatgtgctgctggaagacgtgccgggagtcggaaaaacgatgatggtccgggctttggccaagctgatcggagctgactttaagaggattcagttcacgccggatcttctgccgtcagatgtgacgggtgtctctatttataatacgaaaacaatggaatttgaataccgcccgggaccgatcatggggaatatcgtgctggctgatgaaattaacagaacctctccgaaaactcagtcttccctgcttgaggcgatggaggaagggaatgtcacgattgacggaaagacaatgcggctggctgagccgtttttcgtcatggccacacaaaacccggttgaatatgaaggaacgtatccgcttcccgaagcccagcttgaccggtttttatttaagctgcgcatgggctacccgactgccgaggaggagcttcgggttctgtctttgcaggaagggcgcaatccgcttgaaacaatcgagcccgtcatttctaaagaacagttcatcaccctccagcaaaaactggagcaggtgcgggtggatgatggagttaaagcgtatatcgtcggcattactcagcatacccgccggcatccgtccgtacatctgggcgtcagcccgcgcggttcaatttcaataatgaaagccgcgcaggcgtacgcgctgcttcatgaccgcgattacgtcattcctgatgacgtccagtatttggctccgtatacgctgccgcacagaatgatcttgaccgccgaggcgaaatttaacgatgtgacgccggaagcggttatagaagacatcatgcaaacggaaaaagttcccgttcaaaggatgtcggtccgctaatgagaaagaagatgcattggcttctatatggctggaagctgcttatgttggccgtactgacggcggctgtcttttcttatgccatgtttcagggcggatttgtgagctggtttttattttatgcgtttttgccgtttaccgtttacgccgggctggtcgctgtgtacccgttgcgggcgtttcaggtgacgcgtgacgtgtcctccgcccagttaacctcaggcgacaggctgtctgccaccatcaggctgacgaggcgcctgccgtttccgctgacatatatggtcattgaagatgtgatgccggaaacgcttggtgagaggcgcagtgcgaaacagcttgtgtttccgtggtttcaaaggaagatgacgttacaatatgagctgccgcaggtgccgcgcggagagcatcatttacatacgatcagagttcggacgggagatgttctcgggcttttggacaagacggcgtcgttttccgtaacggatacggttctggttttcccggcgtacgggcctgttcactataagccgcaggctgcatccggagaagagggtgcgggtgccggcgctccgtttcaggtacaccgcacagcaatggctgcgagcgtcagaaattatcagccgggcgaccggttttccgcacttgactggaaaacatcggcgcgtcgaaatgagctgatgacgaaggaatttgacccgttgcagagtatgaatatgattctccttttggactgcaggccgtccccttcgtttgaagccgcggtgtcagcttcggcatccctgctttacacggcgcttgtgaagggctctcccgcaggatttatttcattggggagcgaccggactgtatttcccgtccgggagggagagcggcatttcagacagatgctgcgttacctggcatcagcttcagagtcggaagaagccgatgcaggcgggcgtttagggaaagaactgggtaaagcttccattgccgtcgtgacgggcagtcttacagaagaccttctcaaacaggctgagcccggccgtgctgacatgacggtgtttttggcgaaagaaacgaatgccgcgctttcggagaaagaacggaaactcgctctcatcttcgctcagaaaaatattaaggtgcaaatgatcagggacaaacgggtgtcccatgttgtttagaaagagaggtggcgcgccatgccgcatgacgagaaccagggaagcaggctgagtctgctgctgttttattttctcgcttttttattgttatgggaatggctcaggccgctgcacaattttacggatacaaaacataccggttttttcatcgtttttatcggtttggcatttctgctgtcattcttccggatgaggtggtacgtgaccgtgccgtcctgcattctgtttacgttgatcagtattcacatcctgttttataaaggttctatttttcagccggaatggctcgtttcttttttgcgggacgtgatgcaaaatgcccgccacatcggaaccggaagatggaatgatatgaatccgtcattccgcacgttgctgttttttgtgcttttatggctgctcgtgtatttgctgcattactgggtgatctatcagcggaaaatattattcttttttatcatgacggtggcgtatatcaccgtgcttgatacgtttactccttatgatgccgcgtacgccgtcatccggatcgtctttatcggctttttgatgatggggcttttgtatatggagcgcatccggcttacggaacacatagcgtttaaaaaaagattgatactcaaatggtttctgccgctgatgctgtttatctgcgcttccgtagtgttcggtctggcggctccgaaatcagacccgaactggccggatcccgtgccgtttctaaaaaaaatcacaaaccacaaagaagtgcccgccgccgaaagtaaaatcggctacggcaatcatgatgaaacattgggcggtccttttcaggaggatgatacgccggtttttacatggaagggaaaagaacgggcgtacttccgggtggaaacgaaagatacatacacggggaaaggctgggtggagaccgatcagggcatgtcctataaactgaacggcggcaatgtggaagatatatggtttgaccggagtgtgcagacgagacggtatacggcacaggtgtccattgatgagaattatctctataatcacgtcatgtatccgatcggcgtctccaatattaaaccgaagcactcgattcagcttgaaatgaacggaaacaccgagcaaattacgccggtcagtgaacaagtgggcaacatccgcaatatgggacggtacacggtgacttttcaggcgcccgtctttaagctgaatgatctcagaaaagtgaaagtgaaacgataccgtgagcagaatcaattcaatgaccggtatttacaggtccccgacagccttccgggaagagtgcgacagcttgcggacagattgacgcgggatcatcataatatgttcgataaagcgaaggcgatcgaggattatctcggatcttccgcattttcgtataatacacaggatgtcgcggttccggagcacaatcaggattatgtcgatcaatttctgtttgaaacgaaaagaggatattgtgataacttttcatcggcaatggccgtgctgctccgctctgcgggaattcccgcccgctgggtgaagggctatacatccggtgaatataaaggggcaggcgaccataacggccacatttatgaagtcacaaacaacaacgcccattcgtgggtagaagtgtattttcccgatcagggctgggtgacgtttgagccgacaaaaggcttcaccaatccgacggagtttacgtcagagcaaaatcataccgcggcaaaagacagcggaggctcagcggggaattcggattcaccgtctgacaagcagcgtcaggaaacaaagccggaaaaagaagaaacaccgaaaaagcgggatcacagcgcggcaccgcagcctgtgatccgcaacaaaaccgcggcacacctgtggccgtatgcagccatcgtcatcgtaatttcagccgcggcggcactcgcctggctgttccgggtgcgctggattccgcacgttacagcagccggattgaagcggcgaacggatgaagacgtctttttcgacgcatatgccgcgctgctccgccagctgaaacgaaaagggttcagcaggggagacggagaaacgctccgcgattttgccgcaagggttgatgaggcgcaccatacaaacgacatgtccgagctgacgctgcgctatgagcgtgctttataccgcagcgataatgccgcaaagctttggaatgaatcgggacagttgtgggaaaatataattaaaagaagatagtcttgaccgcatatcgtcctgttgttagaatatatgaatgttaaatgggagcccgggagcgttaaaaagccgggcttccggacaagtcttgccgacagagggctgaacgtgtgtcctccgttttttctgtgtcaaaaacttagaggagattaggtgacaaccatgacgaagttagtgaatgaaatgattcttgttcttgatttcggcagtcagtataaccagctgattacccgccggatccgtgaatttggcgtatatagcgagctgcatccccatacgttgacagctgaggaaatcaaagaaatgaatccaaaaggaattatcctttcaggcggaccgaacagtgtatatgatgaaggatctttccgctgtgatgaaaaaatctttgaactcgatattcctgtattgggcatctgctacggcatgcagctgatgactcattacctcggagggaaagtcgaggcggcaagccagcgcgaatacggaaaagcgaacattcagattcaaggaactccagacttgttcaaggatcttccggaagaacaagttgtctggatgagccacggcgacttagtcgtacaagtgccggaaggatttacggtagacgcgacgagccatcactgcccgaactcggcgatgagcaaaaaagacaaaaaatggtacggtgtgcagttccatccggaagtccgtcattcagaatacggaaatgaccttctgaaaaactttgtcttcgggccttgtgaatgtaaaggcgaatggtcaatggaaaactttatcgaaatcgaaatgcaaaaaatccgcgaaacagtcggagacaagcaggttctttgcgcgctaagcggcggtgttgattcctctgttgtggctgctttaattcataaagcgatcggcgaccagctgacttgtattttcgtcgatcacggcctgcttcgtaaaggcgaagctgaaggcgtcatgaaaacgttcagcgaaggctttaatatgaatgtcattaaagttgatgcgaaagacagattcttaaacaagctgaaaggtgtttctgatcctgagcaaaaacgcaaaatcatcggcaacgaattcatttacgtatttgatgatgaagcggacaagctgaaaggcatcgattaccttgcgcaaggaacgctttacacggatattatcgagagcggtactgcaacggcgcaaacgatcaaatcgcatcacaatgtcggcggacttcctgaagatatgcagtttgaactgatcgagccgctgaacacccttttcaaagacgaagtgcgcgcgcttggcacagagctcggccttccggatgatatcgtatggcgtcagccgttcccgggccctggacttggcatccgcgtactcggtgaagtaacggaagaaaaacttgaaatcgttcgtgaatcagacgcgattctgcgtgaagaagtggcgaaccacggccttgagcgcgacatctggcagtacttcacggttcttcctgacatccgcagcgtcggcgtcatgggagatgcgagaacgtatgattacacaatcggtatccgtgccgtaacatcaattgacggcatgacatctgactgggcgcgtatcccttgggatgtgcttgaagtgatttcaacacggatcgtcaacgaagtgaaacacatcaaccgcgtcgtgtatgacattacgagcaagccgcctgcaacgattgagtgggaataaatgaagataaaaaacgtctcttttaaaaaagaggcgttttttttcatctttttgaaaccgttttgccccgattcatatctaacagcataggaggtggataaggtgaaggaagaacgattgatcaaaaaggcgaaaaaaggtgatgccgcagcctttgaaaaactgatcacaacccatcaggagactttatataaaacagcttatctttatttgcatcacaaggaagatacactggacgctgttcaggaaacggcttacaaggcttttcttcatatcgcacagctgaaggagccgaaatattttaaaacgtggctgatccggattctgcttcatacgatttttgcgatgaggaaaaagcacggagacgtcattccgtttgagccgcagcacgatacgcgcgcggagaataagaatattgaagaatacatagatcttcggaatgctctggaaacgcttgacgaacatatacagctgaccattcagctttattattttcaagatttctcgattggtatgatcgctgaacagaccggtatggcggaaggcactgtaaaaacgcatctctacagggcgagaaaagcattgaagcaggaactggaaaaggaggataaacacatatggaaaagcatcaaatgaagcaattgtatcaggacattgacgtgccgaaagctgagttgaaaaacgtgatacacagcgctgctgtccgtgccggaaaagaaggcgccgtcagacggagatggggacgaaaagtgataaacggcctcgcggttgctgctgctctgtttattctgtatctgtcctcaggcttgttcatgccctccgttaacaccgctatgggaaacattcctgttgccggacaaatttacagtctgtttcaggataaggcaggttctgcgctgtttaaaagcaatttggtgacaaaactgaacgaaaaagcggaatcacgcggaatcacggtgacagtgaaaagtgtgtattacgacagcggacagctcgtttataactttatcgttgataatttgaaatcagatgaggagagcatctcttttcaagtcgattataaagatccacggaatatgttagcagaggattatgacagcagtgatatgaaaaaaatgaaagacgggcggtacgcggggcagcttcgcctgttcacggacggctcaaagctgaaagacggtgataagcttccgcttgtcattacacaaatcaaggatatccccggaaactggcgctttacactccctattaaaaaacaaaagtccgtttctcttgaaggaacgaaagctgtgaatgtaaatcacggattataccgctttttcgatatccgggcggaaaacggaacgatgggatcggctctcctgtattctatcgacttctatgatgcagccaaaaatgatgccatctcgattgacgaagcaacggatgatgctggaaaccattatgaaatgacgatgtcgaatattgaacttggcggcaggaagaatcttcccggcggcgggaaaagaatacgcggccaaactcaattcagcaaaccgatagacccgaaagcgaaaacacttttcataacgggtgatataaaaacagaatcagagccgggagaaatcgtgcctctgaaaacaaaactgcccgtcagttataaaacgaaacatcatcatgtcggcattaccatcaaaaagatcaaacagcaagacagacgggtgatcgtcgattatcaattcacaggaattaattacagcaaagcggataaagatcagctgatgaatgtcggtgaatcaatcggtctcggcaatacgaaaaaaatgaaaacttggccatcgcttaatgagtatgaaaaaggctattatctgaaagggaataaggcgaaagtcacgaatcttaaaaagggtgaaatggaatccgtttttgaattagatgattcatccgataaagactattcattgcgcgatttctcattcgattcatatgctttgtacgtcaatcaaacggttatgaacttgctggcggatgacaaggggatcacattcgcggtgccggttcggcctgcgaacggaaaatgatgccgggaaggcggcccttgccgtcttccatttttggtcaattaacgaataaaccaattttttttaactggattgttcgtttttttattgagttttcaaaattgaattgatacaatagactcagaaatcaaatatgcagatatcgtataatggcggggatatggcccgcaagtttctaccaagctaccgtaaatggcttgactacggatcaatctcaatcgtttgatataaataatccattcttatttattcagactgaacgtatgtagtcaagcgtcccaaatgtatttggggcgttttttatttggcggataacgggcagaataaatgggagagaatgaaggaggcaattggcttgaagcaattttttcagtttgatgagctggggacaagctatcgtaatgaaatcatcggcggtttaacgacctttttgtcaatggcgtacattctgttcgtcaatccgctgacattgtctttaaacggtgtgaaaggatttcccgaagcattaaaaattgatcagggcgcggtgttcaccgctacagccttggcatctgcggccggctgtattttaatggggcttattgcaaagtatccgatcgcgattgcgccgggtatgggattaaatgcgttttttgccttctctgtcgtactcggcatggggatttcatggcaggctgcgctttccggcgtcttgatttccggaattatcttcgtggcgctttcactgacgggattgcgggaaaaaatcattaatgcgattccgcctgagctgaaattggcggtcggcgcgggtatcggtttgtttatcacatttgtcggtttgcagggttcgggcattattgaagcgaactcatcgactttggtgtctatcggcaatattcacagcggccctgtgctgctgacggttttcggtgttattgtgacggtcattctgatggtgcttcgcgtaaacggcggcgtgtttatcggaatgcttttgacggcggttgccggtatgatctgcgggctgattccggttccgacacacattgtcggcagcgtgccgagtcttgcgccgactttcggacaggcgtggatgcaccttccggatatcttctccgtacaaatgctgattgtcattttaactttcctgttcgtcggatttttcgatacggccggtacgctggtagctgtagcgacacaggccgggctgatgaaggaaaacaaacttccgcgtgcgggaagagcgcttttggcggattcaacatcaatcgttatcggagccgtgctcggtacgtctacaacgacttcttatgttgaatccagctcaggcgttgcggcgggggcgcgctccggcttcgcggctgttgtgacgggcattctctttttgctggcgatgtttttctcgccgcttctgtcagttgtcaccacgaatgtgacggctccggctttaattatcgtcggcgcgctgatggtggcgccgctcggtaagatcgcctgggataaattcgaggtggctgttccggcatttttaacgatgattatgatgccgctgacgtacagtattgcgacggggattgcgatcggttttattttctacccgattacaatgatctgcaaaggaaaaggaaaaagcgttcacccgattatgtacgggctgttcgtcatctttatcctgtatttcatcttcttgaaataacggaaaaaccggctggggaaagccggttttttgtttttgtcctattccgtaaaaccaatacataatataaaacgtcatgtgggtgtccgggtgaagaaaaccgcttgactgtttaaggccgcttcggtaccttatataagtgttttattttcttgctaaacaaattccgccgtatttttttgataggagttgctgacatgacggaagaaagaaaagaaacgttggaagaagaaaaacagcatcagggaactgatgaagaaccgctgtcgagaatgtccagaaatgcgggacgttatcaaaagcaaaagaaaaaagaaaaggaacggcgcccggctccggcttttacggaaaaactcgcttctgcatgggccgcggtcaaacgttattgccgtttcgcgctgcgcattttgacatcaccggtgaaggtcgttggggaagacggcttttcccgctttaaatatgctcttatttcaatgcttgtattcagtatctttttctcaatcggaaattggtttcagctgagggcaagccagcaaaggcctctcggatacggggagcggcatcatacgttttttgacggctttaccgtcgttctcgtgtatacgctcgtcttttttgccgctgcggccggcgcggtctggcttgtatcacgttatatgatgaagcagaaaattacgatgcgggatgcggccgcgggggtcggatcgcttttggttccggctgtcgcctgctctatcgtgtggatgattttcgcgatattgaatctgccggtcatcaccgtggtgtttacggcgctgaccttgtttctggccgcctcggcgatggtgcagtttgtgcagattctatacaaatcggctgaaaagcctgcggctgacgtgatgtactgtatttccgcggcggtcatcatcatgctcgtttttacggctgtgacatggccgctcatttccgagtactttactgcttcgctgattcctttataagtcgaaatttgtctttcacaatgtttacaaatttttctaatgaagcgtgttgttttgaggacccggccgagatatgatgagagcaacagcaattcgaaagcggcactactctttatgattcggaaagggatgatgaagatggccccgttgttgcgagaagccattaatcggaaaaaacagcacctgaggacaaaactgatccgctcagggttttatcaagaccatgttcaggaactgtccgggtacacgctgagtgaacttgagaaggaatatgaagccgtcaaacgattgaaaaaagccgagcttcactgataagagcttgagagtctgccttgcggggcgggcttttttttcttttgaaaatgatgaaaagagggtaaactatccttaattgaaagattggcttttcaaagtcagaggaggggaatcagtgatgcagacaattttatccaacagtataggtatggttctcattattctcatcattaacattatatatgtctctttctttacgatcaggatgattctgacattaaagggacagcgctatttcgccgcaggcatcagtacaattgaaatccttgtgtatgtgaccggcctgagtcttgtgctcgacaatctgaatcaaattcaaaacgtcattgcctatgcgctcggctacggcctcggcgtcatagtgggaatgaaaattgaagaaaaactggcgctcggctacataacagtcaacgtcattacgaaggagctcgatctggacctgccgaaacagctccgggaaaaaggatacggtgttacaagctgggttgcgggcggacttgaaggagaccggaccgccatgcagattctgacgccgcgcaaatatgagcttcagctgtatgatacgattaaaacgcttgatgaaaaagcgtttatcatcgcctttgagccgaaaacgatccacggcggattctgggtgaaagcagtgaagaagaggagaattaaggaatgacaaagccaaaaaagaaacggtttgaagtaacggaacatgaaacgattgacaccattctcactttaatgaaggaagagggttatatgcccgtccggcggatggaagagccgatctttacagaaaagaaagaaaatggatcaattcaagtcgttccttgcgggaaaaaaatcgtatttgaagggaaattgatctaaacacgaacattaaaagaaagaatttttatatcgttcgataatgtcgttgacattatccaagtccgttgttaagataaacatgaaatcaaaacacgacctcatataatcttgggaatatggcccataagtttctacccggctgccgtaaacggccggactatgcaggaaagtgataaacagctgacatggatatcgcagaagcgaacgactgacgatacgcgcgccatgcccggtttgtattgcttcctcatagttgcaatataagccgggcttttttttctgaaaaacaaagcatgagaaggtgggaacagaatgcagccgctagcaggaatcatcatgggaagcacctccgattgggagacaatgaaacatgcatgcgacatacttgacgaacttcacattccttatgaaaaacaggtagtatccgcgcatcggacgcctgatttgatgtttgaatatgcagaaagcgccagagacagaggcttaaaagtcattattgccggagccggtggagcggcgcatctgccgggtatgacggcggccaaaacgacactgccggtgatcggcgtaccggttcagacaaaatcgcttaacgggcttgattctcttctgtctatcgtacagatgcccggcggcgtgccggtcgcgacaacggcgatcggaaaagcgggcgcagtgaacgcgggtctgttagccgcgcagattttgtcggcatttgacggtgacattgcggataaactagaggcgagaagaaatgcgacaaaacaaacggtgctggaaagcagtgatcagcttgtctgataaaaaaacgatttatcccggcgccgtcatcggcattatcggaggcggacagctcggaaaaatgatggctgtcgccgcaaaacagatgggctataaagtcgcagtcgtcgatcccgtgaaagactcgccatgcggacagatcgccgatattgagattaccgcccagtacaatgaccgtgaagcgattcaaaaattggccggagtcagtgacatcattacgtacgaatttgaaaatatcgattacgaggcgctcaactggctcaaagaacatgcatatcttccccagggaagcgagctgctgcttatcacccaaaacagggaaacggaaaaaaaggcgatccagtcagcaggctgtcaagtcgctccttatcggatcgtaaacagcggacgggagcttgaggaagctgttcaggcactggggctcccggcggtgctgaaaacatgccgcggcggatatgacggcaaaggccaatttgtcattaaggaagaaggacagacagacgaagcggccgcgctgctagaaaacggcacgtgcatactggaaagctgggtatcgttccggatggagctttccgttatcgtgacgagatcggtgcacggtgagatttcaacctttccggctgctgaaaatatccacaaaaataatattctgttccaaagcatcgtgcccgcgagagcggaggaaacggttcaaaagcgggcagaggcgcttgccgtccagctcgcggagaaattggagcttgtcgggccgcttgcggtggaaatgttcgtcacagaagacggagaccttttgatcaatgaactggcgccgcgtcctcacaactccgggcattatacgctcgacctttgtgaaacgagccaattcgaacagcacatcagagcggtctgcggacttcctctcggcagaaccgatcttctcaaaccgggaatgatggtgaatctgctcggtgaggaagtgaagcttgcggaggagcatacggagcttttaaaagaagccaaactgtacctgtacggaaaacatgagattaaaaaagggcgcaaaatggggcatatgacatttttgcggaagcctgatgaaacatggattcaggacatcacgaacatatggatgaaaagagacggaggacgagcataatgatcgaacgttattcaagacctgaaatgtccgcgatctggacggacgaaaacagataccaggcatggctggaagtcgagattttagcctgtgaagcctgggctgagcttggcgtcattccgaaagaagacgtcaaggtcatgcgcgaaaacgcgtcttttgacatcaaccggattttggaaatcgagcaggatacgcgccatgacgtcgttgcatttacccgcgcggtttcagaatcattaggcgaagaaagaaaatgggtccactacggcctgacgtcaacagatgtcgtggataccgctctttcctatctattaaaacaggcgaatgagatcttgctcaaggacattgagagatttgttgacattataaaagaaaaagcgaaagaacataaatacacggtcatgatgggccgcacgcacggcgtacacgcggaaccgacgactttcggcctgaagctcgcgctttggcacgaagaaatgaaacgcaaccttgaacgtttcaagcaggcaaaagaagggatcgaagtcggcaagctttccggcgcggtcggcacatatgcaaatattgatccgttcgtagagcagtatgtctgtgaaaaactcgggctgaaagcggcgccgatttccactcagacattacagcgcgaccgtcatgcggattacatggcggcactggctttgatcgcgacgagcattgaaaaattcgcagtggaaatccgcggtctccaaaagagtgaaacacgtgaagtggaagagttttttgctaaaggacaaaaaggctcatcggctatgcctcataaacggaatccgatcgggtcggaaaatatgacgggcatggcgcgcgtgatccgcgggtacatgctgacggcatacgaaaatgtaccgttatggcatgagcgtgatatttctcattcatcagctgagcgcatcattcttcctgacgcgacaatcgcgctgaattacatgctgaaccgattcagcaacatcgtcaaaaacttaacggtattcccggaaaatatgaaacgcaacatggaccgcacactcggtttaatctattctcagcgcgtgctgcttgctttaatcgacacgggtctgcctcgtgaagaagcatatgacacggttcagccgaaagcgatggaagcgtgggaaaaacaagtgccgttccgccagcttgtcgaagcggaggaaaaaatcacgtcccgcctcacaccggaacagattgccgattgctttgactacaattatcatctgaaaaacgtcgacttgatctttgagcgtttaggtttatagaagaagccagccggaggcggcttcttcagccgccgtagattgaatattcccaacattcgggttaggaggccttccgtgaatattgtgaacaataatcttctttatgaaggaaaagcgaagcgaatttatcaaactgaagacgaacagattctccgcgtggtctacaaggattccgcaacagcctttaacggtgagaaaaaagcggagatcagcggaaagggccgtctgaacaatgaaatttcaagcctgattttcaaacatctgcacgccaaaggaattgacaaccactttgtggagcgtgtttcagaatcagagcagctcatcaaaaaagtgagcatcattccgcttgaagtcgtggtcagaaacattgccgccggaagcatgtcgaaacgtctcggcatcccggaaggaacagagctcccgcagccgattatcgaattttactacaaggatgacgcactcggcgatccgctcatcacagaagatcatatccggctcttaaaagcggcggctcctgagcatgtcgaaacgatcaaatcgattacaaaccaggtgaatcaagaacttcagcatatttttgaagactgcggggtcagattaatagattttaagctggaattcggcttagacgcagagggacgggtgcttttagcggatgaaatttctcctgacacgtgccgtctgtgggacaaagacacaaacgaaaagctcgataaagatttgttcagacggaacctggggagcttaaccgacgcatacgaagagattttcaaaagactgggaggcatttcataatgtataaagtgaaagtttatgtcagcttaaaagaaagtgtgctcgatcctcaaggaagcgcagtgcagcatgcattgcacagcatgacctacaatgaagtgcaggatgtgcgcatcggaaaatacatggagctgacgatcgaaaaatctgaccgcgatcttgacgcgctcgtgaaagaaatgtgtgaaaagctccttgccaatacagtcattgaagactaccgatatgaagttgaggaggttgtcgcacagtgaaatttgcggtgattgtgttacccggctccaactgtgatattgatatgtttcacgccgtaaaggacgaactcggcgaagaagtcgagtatgtctggcacgaggaaacaagccttgacggatttgacggcgtgctcatccccggcgggttttcatacggcgactacttgagatgcggcgccatcgccagattcgcaaacatcatgccggccgtgaaaaaagcggctgccgaaggaaaaccggttctcggcgtctgcaacggattccagattctgcaggagctcggacttctgcccggcgccatgagacgcaacaaagatttaaagttcatctgccgcccggttgaattaatcgtacagaacggcgatacgttattcacatcttcctatgaaaaaggacaatcgattacgattccggttgcccacggcgaaggcaatttctactgtgatgacgaaacgcttgaaagattaaaagaaaacaatcaaatcgtcttcacatacggcggcgatattaacggaagcgtcagcggcattgccggcgtcgtgaatgagaaaggcaacgtattaggcatgatgcctcaccctgagcgcgcagtcgatgaactgctcggcagcgcagacggtcttacattgttccggtctatcgtgaaaaattggagggaaactcatgtcgctactgcttgaaccaagtaaagaacaaataaaagaagagaaactctatcagcaaatgggtgtcagtgatgacgagttcgcactcattgaatctattatcggaagattgccgaactacacggaaatcgggattttttccgtgatgtggtcagagcactgcagctataaaaactcaaaaccggttttacgcaaattcccgactagcggcgaacgcgtgctgcagggtcccggagaaggcgcgggaatcgttgacatcggtgacaatcaggcggtcgtgttcaaaattgaatctcataaccacccgtcagcgcttgagccataccaaggtgctgcgacgggagtgggcggcattatccgtgacgttttctcaatgggcgcccgtccgatagctgtattaaactctcttcgatttggtgaactcacttcacctcgtgtgaagtacttgtttgaagaagtagtggcgggaatcgcgggatacggaaactgtatcggcatcccgacggtcggcggagaagtgcagtttgacgcaagctatgagggcaatccgcttgtcaatgcaatgtgcgtcggcttgattgatcataaagatattaaaaaaggccaggcgaaaggtgtcggcaacacggtcatgtacgtcggcgctaaaacgggccgcgacggcatacacggcgctactttcgcatcagaagaaatgtcagattcatctgaagaaaaacgttccgcggtgcaggtcggcgatcctttcatggaaaaacttctcctggaagcatgccttgaagtcatccaatgcgacgccttagtcggcattcaggatatgggggcggccggtctgacaagttcgagtgctgaaatggcaagcaaagccggctccggcattgaaatgaaccttgatctcattccgcagcgggaaacgggtatgaccgcttacgaaatgatgctttccgagtctcaggaacgcatgcttctcgtcattgaacgcggacgtgaacaggaaattgtcgatatttttgataaatatgaccttgaagcggtttccgtaggtcatgtgacggatgataaaatgctccgcctccgccataacggagaggttgtttgcgaacttccggtcgacgcactggcggaagaagcgcctgtataccacaaaccgtcagcagaacccgcgtactaccgcgagtttcaggaaacagaagttcccgcgcctgaagtaaaagatgggacagagacgctttttgccctgctgcagcagccgacaattgccagcaaagagtgggtgtatgatcaatatgactacatggtgcgcacaaatacggtggtcgctccgggctctgacgcgggagtgctcagaatccgcggcacgaaaaaagcgctggcgatgacgacggattgcaacgcccgttatttatatcttgatccagaagaaggcggaaaaatcgccgttgccgaagcggcgcgcaacatcgtatgctccggcgccgaaccgcttgcggtcacggataatctgaatttcggaaacccggaaaaacctgaaattttctggcagatcgaaaaagcggccgacggcatcagcgaggcgtgcaatgttctcagcacacccgtcatcggcggtaacgtatcactttataatgaatcgaacggaacggctatctacccgacgcctgttatcggcatggtcggcttaattgaagataccgctcatattacgacacagcatttcaaacaagcgggggatcttgtatacgtgatcggcgaaacaaaacctgagtttgccggaagcgaactgcaaaaaatgacagaaggccgcatttacggcaaagcgccgcaaatcgatcttgatatagagctgtcacgccaaaaagcattgcttgacgcgattaaaaaaggcttcgttcaatccgcgcatgacgtatctgaaggcggcttaggcgtagcgattgcagaaagtgtcatgacgacggaaaaccttggcgccaacgtgactgttgaaggggaagcggcattattattctctgaatctcaatcccgcttcgtcgtttcggtcaaaaaagaacaccaagcggcgtttgaagcggctgcggctgatgcggttcatatcggtgaggtaacggctgacggacttctggcgattcaaaaccaggacggacaacaattggttcacgcgcaaacgaaagaacttgagcgcgcgtggaaaggagctattccatgcttgctgaaatcaaaggcctgaatgaagaatgcggtgtgtttggcatctggggacatgaagaagccccgcaaattacgtattacggtctccacagcctccagcacagaggacaggaaggcgcgggaattgtcgcgactgacggcgaaaaactgacggcgcacaaaggccaagggctgatcactgaagtatttcaaaacggcgagctcagcaaagtaaagggaaaaggcgcgatcgggcatgttcgttacgcaacggctggaggaggcggatatgaaaatgttcagccgctcctgttccgttcgcaaaacaacggcagcctcgcgctcgcccataacggaaacctggtcaacgccacacagctgaagcagcagcttgaaaaccaagggagcatttttcagacttcctccgatacggaagtgctggctcatctgattaaacgcagcggacacttttcgctgaaggatcaaatcaaaaattcgctatctatgctgaaaggcgcttatgcctttttaatcatgactgaaacagagatgatcgtagcgcttgacccgaacggactcagaccgctgtcaatcggcatcatgggcgatgcttatgtggtcgcttcagaaacgtgcgcatttgatgttgtcggcgcaacgtaccttcgtgaggtagagccgggcgaaatgctgatcatcaacgatgaaggcttgaaatcagagcgtttttccatgaatatcaaccgttccatctgcagcatggagtacatttatttctcaagacctgacagcaatatcgacggcattaacgtgcacagcgcccggaaaaacctcgggaaaatgcttgcccgggagtccgcggttgaagcggatgtcgtcacaggcgtgcctgattccagtatttctgcggccatcggctatgccgaggcgacgggcatcccgtatgaactcggtctcattaaaaaccgttatgtcggcagaacgtttatccagccgtcacaggctctccgtgagcaaggcgtcagaatgaagctgtccgccgtccgcggtgttgtcgaaggaaaacgggtcgtcatggttgatgattccatcgtgcgcgggacgacaagccgccggattgtcacaatgctcagagaagcgggggcgacagaggtgcacgtcaagatcagttcaccgccgatcgctcatccgtgcttctacggtatcgacacatcaacccatgaggagctgatcgcttcttctcattccgtggaagaaatccgtcagatcatcggtgccgacacgctttctttcttaagtgtagacggattgttaaaaggagtcggccgaaaatttgaagacaccaattgcggacaatgcctcgcttgttttacgggcaaatatccgacggaaatttatcaggatacagtgcttcctcacgtaaaagaagcggtgctgacaaaataaaatgtgaaaatgacataaaggcagcgggaattcaggctgcctttctctttctgcctttttaggagaaacgaattgacaaggagtgatagggatgtctgatgcttataaaaatgccggagttgacatcgaagccggatacgaagccgtcaaacgaatgaaaaaacacgtggagcgcacgaaaaggctcggcgttatgggaagcctgggcggttttggcggaatgtttgatctgtcagagcttccgtatcaaaagcctgttttaatttccggaacagacggtgtcggcaccaaactgaaactcgcattttcaatggataagcatgacacgatcggcgtcgatgcggtcgcgatgtgtgtaaacgatgtgcttgcccagggagcggagccgctgtttttccttgattatttggcggtcggcaaggctgatccggtgaaaattgagcagatcgttcagggtgtggcggacggatgcgagcagtcaggatcagcgcttatcggcggtgagacggcggaaatgccggggctgtatacgtctgatgaatacgatattgcgggcttttcagtcggcgtcgcggaaaaagacgaaatcgtcaccggtgaacatatcgaagaggggcatctcttaatcggacttacttcaagcggccttcacagcaacggattttccctggtgagaaaagtgcttcttgatgacggcggacttgatttggatactgtctatgaaccgtttgcgcgtcctctcggcgaagaattgctggaaccgacgagaatatatgtgaagccggtgctcaaggcggtgaaaagcggtaaggtggacggcatggcgcatgtgacaggcggaggattcatcgagaatatcccgcggatgctgccggacggattgagcgcggaaattgatcacggatcatggccgatcccgccgatttttccgtttctgcaggagcacggcaagctgaaagaagaagaaatgttcaatgtctttaatatgggcatcggttttgtccttgccgttaaagaagaaaacctgacagacgtcatcggcacgcttgaagctcagggcgagaaggcttatctgatcggccgggtcaagcggggcgaaggcatttctttcggcggtgcggctctttcatgaaaaagtttgcggtatttgcttcaggaaacggatcgaacttcgaggccattgccaaacgcatgagagaagagaagtgggatgcggagctctcgcttctcgtgacggataagcctcaggcaaaggcggcggaaagggcggaggctttacatatcccgtcattcgcctttgaaccgtcatcttttgaaaacaaagcggcctttgaacgggccattattgaacagctgcgcctgcacggggcggaattaatcgttctcgccggctatatgagactgattggagatacgctgcttgaagcatacggaggacgcattattaatatacatccctcgcttcttccggcattccctgggattgacgctgtcggacaggcgtatcgggccggtgtgaaagtggcgggcattaccgttcattacgtcgacgaaggcatggacaccggaccgattatcgcgcaaaaagcattcgaaatacaggaaaacgatacgcttgaagacatagagcatacaatacacgagcttgagcacaaatggtatccgagcgttgtgaaacggctgctgggactaaataacagaggtgaaaaggcatgacaatcaaacgcgcactaatcagtgtttctgataaaacaaatctcgtacctttcgtaaaggaactgacagagctcggcgtcgaagtcatttcgaccggaggaacaaaaaaacttcttcaggaaaacggtgtggatgtcatcggcatttcagaagtgaccggatttcctgaaattatggacggacggttaaaaacactccatcctaatattcacggcggtctgcttgccgtaagagacaataaagagcatatggcgcagatcaatgaacacggcattgcaccgattgaccttgtggtcgtcaacctttatccgtttaaagaaacgatttcaaaagaagacgtaacatacgatgaagcgatagaaaacattgatatcggcggtcccggcatgctgcgcgccgcatcgaaaaaccatcaggatgtgacggtcatcacagatccggccgattacagctccgtgctcaatgagatgaaagaacacggcggcgtttcgctcaaaagaaaacgcgagcttgcggccaaagtattccgccataccgcggcatacgacgcattaatcgctgattacttaacacgcgaggccggtgagaaagaccctgagcaattcactgttacttttgagaaaaaacagtcgctccgctacggtgaaaaccctcaccaagaggcggttttctaccaaagcgcacttcctgtctccggttccatcgcagcggcaaaacagcttcacggcaaagagctttcttataacaatattaaggacgcggatgcggctgttcaaatcgtccgggaatttacagaacccgcagctgttgccgttaaacatatgaatccatgcggagtcggtacgggagcttcaattgaggaagcattcaataaagcgtatgaagctgataaaacctccattttcggcggcatcatcgcgctgaaccgtgaagttgatcaggcaacggctgaagcccttcacggcatctttttagaaatcattatcgccccttctttcagtgaagaagcgctgaacgtgctgacggcgaagaaaaaccttcgtctgctcacgcttgacgtgaccgcatcaggaaagaaagaaaaacagctgacttccgtacagggcggtcttttgattcaagatttagacgtccatggatttgatgacgccgacatcaccatcccgacaaaaagagagccgagcgagcaggaatgggaagatttgaagctggcctggaaagtcgtcaaacatgtgaaatccaacgcgatcgtccttgcaaaagaccatatgacggtcggtgtgggcgcaggacagatgaatcgcgtcggttcagccaaaatcgccattgagcaggccggagaaaaagcaaaaggcagcgcgctcggatcagacgcgtttttcccgatgccggatacagtcgaagaagccgcaaaagccggtgtcacggcgattatccagcccggcggatcggtccgcgatgaagattcgattaagaaagcggatgaatacggaatcgccatggtattcaccggcatcagacatttcaaacattaaggggggaacgaagcgtgaatgtattgattatcggaaaaggcggcagagagcatacattggcttggaaagcggcgcaaagcccgcttgttgacacggtgtacgccgcgcccggaaatgacggtatgacagactgcgcgacgctggtcaacattggagaaagcgatcatgccgcactcattgcgtttgcgaaagaacatcatgtcggcctgacgattatcggccccgaagttcctctgattgaagggatagccgacgagtttgaaaaagccggactgcttgttttcggaccgtctgaaaaagcggctattattgaaggaagcaaacagtttgccaaggatttaatgaaaaaatacggcattccgacggcggagtacgagacgtttacttcatttgaagaggcgaaagcatatgtacagcaaaaaggcgcgccgattgtcattaaagcggacgggcttgccgccggaaaaggtgtcacagtcgcgatgacggaagaagaagcgattgaatgcctgcacgattttcttgaggatgagaaattcggggaggcgagcgcatctgttgtcattgaagagtttctcgccggcgaagaattttctttaatggcgtttgtaaaaggggagaccgtctatccgatggtcatcgctcaagatcataaacgcgccttcgatggagacaaagggccgaatacgggcggaatgggagcctactcaccggtgccgcacatttccgatgatatcgtcagaagcgcagtcgaaacgattgtgaagccggcggcaaaagcaatggtgaaagaggggcgctccttcacgggcgtgctgtacgcggggctgattctgacggaagacggatcaaaggtcattgaattcaacgcgcgcttcggagatccggaaacacaggccgtcgtgccgagaatggaatcggacctcattcaggtgctcttagatcttctgcatgagaaagatgttgacctaagatggaaggatacggccgcggtcagcgttgtcctggcttctgaaggctatccggaaggctatgcgaaagggacgccgatcggcagtttgacgtccgctgaagacgggatcgccgtttttcatgccggaacgaaaaaagacggcggacaatttgttacgaacggcggccgggtcgccaatgtcacggcatttgctgagacatttgaagcggcgagggataaagtgtacagcgccgtttcggggctgacaaaacccggactgttttacagaagcgatatcggcgcccgtgcgctgaaagcatcgcagcgataaagaggaaacccccgcgtcttaaaagatgcgggttttcttctgaatgacgactaagattgtcatgcagtcttgaattctgtcccggcttttgtgatgccgggatcgccggcagattcttctcatactcgcgggacaggagaaaaaaataacaagccgaaacggcttgttatttttcttgctgatggctgtcatcctgattcattccggcttggaacatatatgtcaccggacagaagcggaggatgccggacgccgctttcatcgcgcccatcatcatacagaagagatgcatcttgcaccaaggttttctcgtgtattttgctgaagcggcagacaaaatggtgaggccgcaagtgatgcgcataacggcgtttaataaactgatattcggtttcatcatttcagctcccttagaaaaagtttttcattcatcttcaataatttgtaacgttttagccgtgcgataattgtgcggatgtgatacgatgggtctaatataagcgaaggagagtatgtgaatgtccgaacgtacctttaactggaaaaataaagacatcagatcacaggcggatgttgtagactcaaagctgcttccaacgctacttttacgggatgctctcgtattaaatccttttttaaaacaatggctgaaaaagaacgtctggatttacggagaccgaattgtatatgttggtcatgagcttcctgatgcagcagagcacattcataccataaattgtgaaggaaaatacattgtgccaggttacattgaaccgcatacacatccttttcaaatatataatccccaaacgctcgccgaatatgtgtctcaattcggaacaacgacgtttgttaatgataacttgttttttcttttgcacagcggtaaaaagaaagcgcttactatattggaagaactaaaaaaacagccggtgcaatatttctggtggtccagatatgatctgcagactgaagtgctgaatgaggaccagctcctttcttttgatgtccgcaagcaatggattgagcatccggatgtcattcaaggcggagaattgaccggatggccgcgcctcatggacggcgatgacttgatgcttcattgcatgcaggcgacaaagaaactgcgcaagcggatagaagggcattttcccggagcttctgaaaaaacactgacgaagatgaaactgttcggggctgattctgaccacgaggcgatgaatggcgacgaggtgatgagacggcttgaattgggttactatgtttcgctcagacattcatccatccgccctgatttgagaacgattttgcaggatctccatcaaaaaggcttccggcattatgatcatttcttttacacgacggatggagcgacgccgcatttttataaaggcggcatgacgaatgaattaatcaaaatcgctttggaggaaggggttccggcgattgacgcctacaatatggcctcctttaatatcgcgaaatattatcagatggatgactttctcggtgtgatcggtccgggccggcttgcttcattgaacattctcgatgacccgatgaatccggacccggtcacggtgatctccaaaggcatcctgctgagggaagacggccgaaatatgaatgcgtttacagaaacggattggaaaaagggcggtcttgtccctcttgagctttcatatgatatgacgatggatgatttacagttttcaatgccgatgggtgtgataatgcgcaacgccgtcattatggagccgtatatgattgcgattgataattctgttgaccagctttcttttgatcatgatgaatgctatctcacgcttctcgataagcatggaaaatggcgggtcaatacaatgctgaaaggttttgccgatcgggtgcagggctttgtcagttcctacacgacaaccggagatattatcgctgccggaaaaaataaagaagatatcctgctcgctttctcacggatgaaagaaatcggcggcggaatcgtgcttgccgaaaacgggaaggttcttcatgagattcccctcgctttaaacggttctgcatccgcggagaattatgaagaagtgcttgagaaagagcaaaaactgaggacgctgctggaggagcggggctaccgattctgcgatccgatctatacgctgctctttttgcagagcacacacctgccttatatccgcattacgccgagaggaatattcgacgtgatgaaaaaaactgtactctttccatcgataatgcgttaaaatataaaagcagggagccgacatatgaaaagatggaaaaccgtttgtatgctttgttttgcgtttttgctgcttgccgcctgccggcagaacaatgccgatcaggtgcagccgaaagaagcggaagctcctttaacggggctgaaaactgagcagaagcttgcagaacgccgtccgattgcagtcgcagtgaacaatcatccgaaggcgaggccccaatccgggctgtcaaaggcggatgttgtcatcgaagcgctcgcggagggccggattacgcggtttctcgcgatttttcaaagtgagatgccggaaacggtcgggcctgtgcggagcgcgagggaatattttgtcacgctcagcagcgggtttaacagcatatttgtccatcatggctggagtcccggcgctaaaaagcagctggagtccggaacttacgattatataaacggtttggattttgacggcagcctgttttggagagccgatttcagcaagccgccccacaattcctacacgtcgtatgacaatatcaggaaggcggcggaacaaaaaggatacaagctgaacggaaaaacagaaccgctcccatttcagacatcagatgcaaaacccggaaacgaaacctacaatattcggatagattatggaacacaaaacgttacaaatcttgtcgaatacgattatgataaaaaagctgatgcttatacaagaagctctgatggtgtgaaagcgacagaccgggagaccggaaagcctttagccatgcacaacatttttattgttgaagccggccatcgcatgacagacaaagatggaaggcgggccatcgatattcagtcagggggaagggcctcctgcttcagcacggcgatgttatggagtcagactgggaatataaagacggccgtattctgcccgtaaaaggcggtgagattcttccgtttgtgccaggaaagacatggattaatatcgtgcctgatctcgatgcagcttccattagtaaaggagaaggtgtttgacgatgcaaatcgataaattacgcggaaaagaactggaccagttatttttatctattttatcgctgaaagatctggaggaatgctatcgtttctttgacgatctttgtacgattaatgaaatccaatcgctggcgcagcgtttggaagtggcgagaatgctccgcgaaggaaatacgtatcacaaaattgaaagcgaaacgggtgcttccacagcgacgatttcccgggtgaagcgctgcttaaattacgggaacgacgcctatgaaatggcgcttgaccgcgtaaacaaaggagaatcctcctcagctacgtaaaaaaccgctctgccgatgacggcaggcggtttttttatgcgtgctgattcaaaaggccgggaagttccctcaggcttccgtcttcctcccggtatacgatgtgttcagctgagaaatgaatcggcgagctgatacccgccgccgcggcaagatgaaacagcccttcacgcaacgagagcacgtagttgcagacgcgatgctgtttatcctcgatactgagcgcgcgctgaagttttggatcggttgtcgccactccgacaggacaatgattggtgtggcatacttgagcgcggatacagccgactgaaaacatcattccccgggcaatattgacaaaatccgcgcctaacgcgagggcaacggcaatcttatcgggagtgagcagctttccggatgcgaaaattttcagcctatctcttataccgtatgtcttcaaaaggccgtcaacaagggggaggccggtcagaatcggcaggccgacggaatccgccagctcatggaaagaagctcccgttcccccttcactgccgtcaatcgtaataaagtcgggaagtttgcctgatgaactcatacaggaaataaggtcttcaaggtctttgcggctgcccgggacaattttgatgccgaccggtttttcaccgacagttcttaatttctcaatgaaatcaagcatgtccggaacatttgagaactcgttgaagcggtttggactgtcaatggattgtccgggctgcacatttctgatggcggcaatttcttcggtcacctttgaaccgtcaatatgaccgcctctagctttcgccccttgcgcaagctttaattcaaaggctttaatctgctcgaggcggctttttttcttaaattcttcccatgaaaattctccatcttcagtgcgcacgccgaacagcccggggccgatttggcagataatatccgcgccgcctttcaagtgatactcagacaggccgccttcgcctgtattcatccatgtgccgccggcctggtgcagcccttttgacagggcggtgattgcccggtcgccaagtgagccgtagctcatcgctgattgtccgattaacccttttacataaaacggtttcttgcatgtgtcgcggccgatcacttgcacatcgtccggatgcaggtaataagggtccgcttttgctttttcgcggtgttcgctgcgtttcagcaggttgtctttgtcaatcttgtataccatcgtgtcgatcttcggcgtctgatctgtgcgcagctcctccctttgtttcgggaagagggcgttacggatataatagcccggctgatcgaaatcccgttctgagccgaagcccatcattctgcttttatactttcccgacatgaccgtctgttcatattctctccgggaaaacggctgttcttcgttatcattgctgaataaatactgccgcagctcaggtccgattttttcaaatatatagcgcagttttcccgctgcgggataattgcgcagcactgaatgttcttcctgcttttcgtctcttatgtaaatccagagaaacaatgcggcgggaactaaaataataaaaatcaatatacaaatcagtacgataatggcttgttccattgagatcagactccttgccttttttctctttgacattccacattttgtctgttttcaaacatagccgtttcccgtccggcggagcgcaatctttttttgtgaatcaggtgaatgacgtctttttccgtttttccgggccaaacgaatttgttataatgtttaaatggcaagaaacgaatggaggaacgaaaacgcatgtacgatgttaacgagtggaagcatgtttttaaactcgatccgaataaagatttaccggatgaacagctggaacggctttgtgaatcagggactgacgccattgtgatcggaggaagcgacaatatcaccgaggacaatgtgctgagactgatgtcaaaggtgcggcggtttttagtgccgtgcgtacttgaggtgtcgacgattgattccattgtgcccgggtttgatctttatttcattccgagtgtgctcaacagcaaaaaggcggactggattgtcggcatgcatcatcaggcgatgaaagaatacggagagctcatgtcaatggaggaaatcgtgacggagggctactgcatcgtcaaccctgattgtaaggcggccgctttgacggaggcggatacacatatagaaacagaagatattctcgcctatgcgcgggtcgcggaacatttgcttcatctcccgattttttatctggaatacagcgggatgctggcggacatagaaacggtggagaaaacgaaggctgtgctggacaagtccgtcctgttttacggaggcggcattaaagacgcggaaacggcggaacggttcggccgtcatgccgatgtcatcgttgtcggaaatgccgtatatgaagattttgatcaggcgctcaaaacggtggcggctgtaaagacaaagtagccaagcggacgaaattgatttatgatagaacatatgtttgataggcggtgaacggatatgaattacattagcaatcaattattaagcggattaaatcccgttcagcaggaagcggtcaagacgacggacggtccgctgcttctgatggcgggcgcgggaagcggaaaaacacgtgtgctgacgcacagaatcgcatacttaatggcggaaaaacacgtggcgccatggaacattctggcgattacctttacaaataaagccgccagagaaatgaaggagcgggtggagagcattctcggacccggcgcggatgaaatctggatttccaccttccacagcatgtgcgtgcggattctgcgcagggatattgacagaatcggcatcaaccgaaacttctccattcttgatacggctgatcagctttccgttattaaagggattttgaaagagcggaatatcgatccgaaaaagtttgatccgagaagtattttaggctccatcagcagcgccaaaaacgagctgatcgaacctgaggaattcgcaaaaacggccggcggctactacgatcaggtcacgagtgacgtgtataccgattatcagaaaaaactgctgaaaaaccaatcgctcgattttgatgatttaatcatgacgacgattaagctttttgagcgtgtgccggaagtgcttgagttttatcagcgcaaattccagtacattcacgtagacgagtatcaggatacgaacagggcgcaatacctccttgtgaagcagcttgcggcccgtcttgaaaatatctgcgtcgtcggtgactccgaccagtccatttacagatggcgcggggcggatatcgcgaatatcctttcctttgaaaaagattacccgagcgcaaacgtgattctgctcgagcaaaactaccgctcaacaaagcggattctgcaggcggctaacgaagtgatcaaaaacaactcaaaccgcaagccgaaaaacctgtggacggaaaatgacgaaggcatcaagctttcttattacagcggcgacaatgaattcggcgaaggccaattcgtcgcgggcaaaatttatgagctgcacagctcgggccggcggaagctttccgatatcgcgattttataccggacaaacgcccagtcgcgcgtcatcgaggaaacccttttaaaatccggtctgaactacaatatcgtcggcggaaccaagttctacgacaggaaagaaattaaagacattcttgcatacctgcgccttgtgtcaaacccggacgacgacatcagttttacgcggatcgtcaatgtgccgaagcgtggcgtcggcgccacttcgctagaaaaaatcgcttcatatgcggcgatgaacggaatgtcaatgttccaggcgatcaaacaggttgatttcatcggtgtcagcgcgaaagcggcaaacgcgcttgacggctttggcgcgatgattgaaaatctgacgaacatgcaggattacctgtccattacggaactcacggaagaaattctcgaaaaaacggaatacagagaaatgctgaaggccgaaaaatcaatcgaagcccaaagccgccttgaaaatatcgacgagtttctttccgtgacgaaaaacttcgaacaaaaaagcgaagacaagtctctcgtcgcgtttctgaccgatctggcgctgatcgcggatattgaccagctcgaccagaaggaagaagaagcaggcggaaaggatgccgtcactttaatgacactgcacgccgctaaggggcttgaatttccagtcgtgttcttaatgggcatggaagaaggcgtgttcccgcacagccgctccctgatggaagaagccgagatggaagaagaacgcaggctcgcatatgtaggcattacgagggcggaagaagaactgtatttaacgaatgccaaaatgcgaaccttattcggccgcaccaatatgaatccggaatcccgctttatcagggaaatacctggcgatttattggagaacctaaatgagaagaaaacacctcgcatgcagccgggaagaaaagtgcagccgaaacgcgggcccgtatcccgtcccgtttcctatgcgaacaaaacaggcggcgactcgctcagctgggcggtcggcgataaagcgggccataaaaaatggggcaccggaacggttgtcagcgtaaaaggagaaggcgaaagcaccgagcttgatatcgcattcccgagcccagtcggcgtgaagcgtctgcttgccgcttttgcgccgattgaaaagcagtaacctgaagaggaaaggaagaacatgatggacaaagaaacagcgaaacaccgggcagaagaattgcgccgcaccatcgatcagtacagttatgaatattacaccttagatgaaccgagcgtgccggattccgagtacgacagactgatgcaggagctgattgccatagaggaagagcacccggaactcagaacgcctgattcgcccacacagcgggtcgggggagcggtgcttgaatcttttcaaaaggtgcagcacggcacgccgatgctcagtctcggcaacgcatttaacgatgatgatctccgcgattttgaccgccgcgtccgtcaggctgtcggtgacggcgtcgcttacaatgtggagctgaaaatagacggtcttgctgtttctctccgttatgaagacggctatttcgtcagaggcgcgacaagaggagacggaacgacgggcgaagatatcaccgaaaacttaaaaacgatccgcaacattccgctgaaaatgaaacgtaatctttccatagaagtgcgcggagaggcgtacatgccgaaacagtcatttgaagcgctcaatgaggaaaggctgaaacatgaagaggagccgttcgccaatccccggaacgcggctgcgggctcactcagacagctcgatccgaaaattgcagcgaaacgaaatcttgacatcttcgtctacagtatagcggagcttgacgagatgggtgtggaaacacagagtcagggcctggattttctggatgagctcggttttaaaacaaaccaggaacggaaaaaatgcgacacgatagatgaagtcattgaaatgatcgaagagctgcaggcgaagcgggccgatctcccttatgaaattgacggaatcgtcatcaaagtcgattcgctcgaccagcaggaagaactcgggtatacggcaaaaagcccgcgctgggcgattgcttacaaattcccggctgaagaggtcgtgacaaaactgctcgatatcgaactgaatgttggaagaacgggcgttattacgccgaccgccgttctggaaccggtaaaagtcgcgggaacgacggtctcaagagcatcccttcataacgaagatttaattaaagagaaggatatccgcattctcgataaagtggtcgtcaaaaaagcgggcgacatcatccctgaggtcgtcaatgtcttaattgaacagcggaccggggaagaaaaagaattcaatatgccgaccagctgccctgagtgcgaaagcgaacttgtccgcattgaaggggaagtcgcgctgcgctgcatcaatccggaatgtccggcgcagatcagagaaggcctgattcactttgtctcacgcaacgcgatgaatattgacggactcggagaacgtgtcatcacacagcttttccgtgaacatctcgtccgtaatgtcgctgatttgtataagctgacgaaagaacaggtcatccggcttgagcggatgggggaaaaatcaactgacaatctgatcagctccatccaaaagtcgaaagagaattcgctggaacgcctgctgttcggtctcggcatccgttttatcggctcaaaagcggccaaaacactggccatgcattttgaaagcctggaaaatctgaaacaagccacggaagaagagctgcttgcggtagatgaaatcggcgaaaagatggccgatgccgttatcacctatttccgcaaagaggaaatgcttgagcttttgaatgaacttgaggaactcggtgtgaacacactctacaaaggcccgaaaaaagtaaaagcagaggacagcgactcttattttgccggcaaaaccatcgtgttaaccggaaagcttgaagagctgtccagaaatgaagccaaggcgcagattgaagcgctcggcggaaagctgacgggatctgtcagcaaaaaaacagacttgctgattgccggagaagcggccggaagcaagctgacaaaagcgcaggaattaaacattgaagtatggaatgaagcacagctattgggagagctaaagaaataagaggagtgttttctattgaaaaagatgttggcattggcggcgacggcaacggcggcagtactcatgctgtcggcctgttcgccgagtttcgggggaaaaaaagaggaagagatcacgcagaaaacggcaaagtcttctgaaaaagcgatcataccgaaatataatatctctgattcctactataaaatggtgctcccgtttaaggccggaaaagcgcgcggcctgaccgcggaccggctgaacacgaggctggacatcgatgaattcgagactgggctgatgcggctcgctcaagacacgttcccgacggatgactatttgtatcaggaaggccagtatttagatgaggacacggttctcagctggcttgaccgcaaaaaagagggcagtgatctgaaaaaggcgaaaaaggcagacgccaatttccagaatctcggcttaaacccggtgctgccaagctcgggatcagcaaaagagaaaaacgaaaacagcccgatttacttagcgtccatgcttgagcaggattacttagtaagaaaagataaaaattccatccagcttggcggtgtcatgatcggtctcgctctcaactctgtatactattaccgcgaaaacacaggtgatccgcagcaggaagtggagctcagcgacaaaacgatccgcagccacggcgaagaaatcgcacaggaagtcgttaaccgccttcggaaaatggataacctgaaaaatgtgccgattaccgtcgccctttataaacaagcgccgaaaacatcaatcgtaccggggaattacattgcgaaaacagaagtcaaggccggctcatccaccatttcaaactgggatgatgtcaaagaaaagtacgtcttctatccggcggatacagacacggcaaagaaataccctgatgattccgaagtgtttaaacgcttcaaaaacgccatcgacagctacttcccgaattacaccggagttgtcggaacggcaatgtacgaaaacgatgaaatgagaaaaatgaagattgaaatcccgatgcaattttacgggaaaagtgaagtcatcgccttcacccaatacttaacaggtgagctgatggattattattcaaaaggctcagttgatgtcgaaattaacattacctcgtctgacgggcaggaagcgctgatcgtccgcaatgcgggtgacaaagaaccgaccgtccatatttacgattaaccaagatgcccttgttcatttctgtatgagcaagggttttttagtgtgaatatcgttggagagaggaatgaggtatgttaagatatttgtataattaggaattaacaggaaaacacatatcatttctaagcggatgttacgaatctgctgtgaaaaaagaagggcaggaatgttgatgaatgacatttgctgagtacacacaccgcctacaaatgttatgaaaagggtgaatcagcatgcataaagatattaaagcgatttttgaggaagataaggtgctggctgaagccggtgaaatatacggatttaccaagtttcaatttattgcggacgcagagaactacgtatatgaaattgtgaaagataacgaaccgtatatcttaaaaattacgcatacgatcagaagaacgccggaatatattctcggagaaatggaatggcttcatcatctggcaaaggaagggctttcagtagcaaagccgattccttcattaaatggcaaagatgtcgaagaagtgccggacggaaaaggcggagcgtttttattaagagtctatgaaaaagcgcccggacgcaaagtggaggaatcagactggaacggaactctgttttaccagcttggaaagtacacggggaacatgcaccggctgacgaaaagctaccgtctgagcgatccggcatataaaaggcaggaatgggatgaagaggagcagctgaagctgagaaaatacgtgcccgcagatcagcatctcgtatttgagcgggcggatgctctaatggaaaaactgcgccgtttgccgaagaatcctgaaaactacggccttgtgcacgccgatctgcatcatggcaattttaattgggacaacggaaaaatcactgcatttgattttgatgatatcggctacaattggtttgtgaatgatatcagtattctgctgtacaacatgttgtggtatccggtcatcccgtatgaagacaaggccgcgtttacgggtgaattcatgactcactttatgaaaggctacagggaagaaaatgaccttgattccgcatggtttgaacacatcccggatttcctccggctgcgccatatgctgatctacggattattgcatcaggcgtttgacctcaattcactcggggacgaggaactcgggatgctgaaagccttcaggcgcgatatcgaaaatgaaacaccgattacggagtatcaattttctgcattcgtataaatagaaaaacgccggctgaatccagcccggcgttttttataacgtatcacattttactccgacgacgccctgaatttctttaatatcataatagacgtcagtggtgtagcggtttttatgaacactgactttcacttccataatcggaaattctttttcacccaggtcatcaatccggacggagtgaatgcggagctgtttgcttttcatttcctttaaaatctcggtcattttgtctttatcggaaagagacattctcacgcggatatccttttccttcaagcgattgggaccgatttttctgatcagccacggaagaaattcgacactgatcaggataaacaagaggcttgcgaacgcctctttataaaagccggcgcctgtagccagacccagcccggccgcgccccagatgatagccgatgtcgtcaggccggatatgacgtcattgcttttacgcaggatcacgcccgcgccgataaaaccgacgccggaaatgatttgggcgggaaggcggagcggatccatcatgatacggtaatatttcgggaaatgatatgctgcattaatgctgacgatcgtcagcatacaggagctgacggcgatgacaatacaggttttcagtccgagcggtttgtttttcagttcgcgttcaagaccgatgatcatgccgatcagcgtggcaatgcccagctttaataaaatgtctggttcgataggccagctcaatttgcacagcacctccgcaatttttcttataataaattgatatgattttctcacagtatttatagcaggacaagtgcggaagaaaaaagccgtcagggataaaatctgacggctttttgtctatttcttgtttttcaaaagagcttccatccggctgaacagctgataagaagcatcggccggttttttggtcagcaggctgacggcaataccggcaatcagactgaggaagaaccccggaatgatttcgtatacgccggttgaagcggcaagccctgtcgtaatccagattaaaacggccgcggccccggtaatcatcgccgcaagcgctccccattcattcatccgtttccagtacagactgagcaagagcgcggggccgatagccgaaccgaagccagcccacgcatatccgaccagatcaagaatggtgctgttcggattcatggaaagcaggatggcgataacggccacgatcaataccgacaggcgtccggtcatgaccaattctttatcgctcgcttcccgtctgaaaaaggcgcggtataaatcttccgtaatggcgcttgccgttacgagaagctgtgaggaaatggaactcatgatcgccgctaaaatcgcggacagcaagaagcccgtaatcagcggatggaacaagattttagaaaaaataatgaaaatcgtttccggatcttttacggagaccccgaagtgatgagaatacgcaaccccgataatcccggtcagcaatgagccgacaactgaaataaacatccagctcatcccgattctgcgggcgggttttaaatctttcacttctttaatcgccataaatcgtacgatgatatgaggctggccgtaatagccgagtccccatgccaaataagaaataatgctaatgacgctcgcgcctttaaagatatccaatagtttcgggttaacggcgttgatcgaatcaatcgtcgttgaaacgctcccgagctgggtaaaagcaacgatcggcacaagcactaatgccgcaaacatgatcgctccctgtacaaagtcagtcagactgacagcgaggaaaccgccaaacagcgtataaagcacaactacacccgccgttaaaaacaaaccgaatttgtagtcggcgccgaatgccgattcaaataacctgcctccggataccatcccggacgatgtgtacagtgtgaaaaagatcataataatcacggcggaaacaattttcagcaatgatgacgagtggcggaatcgtttatcgaaaaaatcgggaatcgtaatcgcatcatccgcaacttccgtgtaagcgcgcagcctcggagcaagcagcagataatttgaatacgcgccgatcgtcaaaccgagcgccagccataaggtcgataaccccgttgcgaacattgcgccgggaactcccatcagcatccatgcgctcatatccgccgcacctgcggacagcgccgttacgaacggaccgagtcctcttccgcccagcatgtaatcattaatattcgttgtctttctgaatgcgtaccagccgattaacagcatggcggcaaagtaaatgccaagagatataattaattcaatactcacgtttttggaccctctcttctttcatgtaaatgttgcatcacctctgtagattagtagtgccggcgatccagcctgcctttagtcatctttcgatggggatcgcatgatttagtgccggctatggttactaaacctaacaaagtatccccgatcaatcaactctcgaaacctggcccgctcaaggaaaaaatccccgccaacctagaacagcttaaagaagaaagcgctaccaataaattataaaagtaaaaattttctgacatataattcgtttctctttctccccgatttaggataaaatagagagggtttcatcatgcctcagaaggcggcgttttgttgctttagagggctcgtttttgatatgatcagtattatatgacgaaacggagaattatgcggaggtggatcttatgtcacgaatttctatagaagaagtaaagcatgtcgctcatttggcgagactcgccattacggatgaagaagctgaaatgttcacagaacagcttgacagcatcatctcgtttgccgaggagcttaatgaagtggacacggataacgtggaaccgacaacacacgtgctgaaaatgaaaaacgtaatgagagaagatgaagcgggtaaaggccttccggtcgaggatgtcatgaaaaatgctcccgatcataaagacggctatgtccgtgtgccatctattctggattaaaggagggagacagtatgtcattatttgatcacaaaatcacagaactgaaacaaatgatacataaaaaagaaatcaagatttccgatcttgttgatgaatcttacaaacggatcgcatccgtggatgataaggtgcaggcgtttttacagcttgatgaagaaagagcccgcgcttacgcgaaagaacttgacgaagcggttgacggacggtctgaacacggtcttctcttcggaatgccgatcggcgtcaaagacaacatcgtgaccaaagggcttcgcacaacatgctcaagcaaaatcctcgaaaacttcgatccgatttacgatgcgacggttgtggaacgccttcaagccgctgaagccgtcacaatcgggaagctgaatatggacgagttcgcgatgggttcttctactgaaaactccgcgtacaaagcgacgaaaaacccttggaatctcgatacggttcccggcggatcaagcggcggttccgcagctgcggttgcagccggagaagtgccgttttcactcggatctgatacgggcggctccatccgtcagccggcttctttctgcggcgtcgtcggattaaagcctacatacggacgcgtgtcacgttacggtttggtcgcttttgcgtcttcacttgaccagatcggaccgatcacaagaaacgtagaagataacgcattcctgcttcaggcgatttcaggcccggacaaaatggactctacgagcgccaatgtcgaagtgccggactttctttcttcattaactggcgatattaaaggcttaaaaatcgccgtgccgaaagaatatctcggagaaggcgtcggcaaagaagcgaaagaatcggttttagccgctttaaaagtgcttgaagacctcggagcgacatgggaagaagtatctctgccgcacagcaaatacgcgcttgcaacgtattatctgctttcttcttccgaagcgtctgcaaaccttgcgcgctttgacggcatccgctacggctaccgctcagacaatgcggacaacctgatcgacctttataaacagacacgctcagaaggcttcggcaacgaagtaaagcgccgcatcatgctcggcaccttcgcgctcagctccggctactatgacgcgtattacaaaaaagcgcaaaaagtgcgcacgcttattaaaaaagattttgaagacgtatttgagaaatacgatgtcatcgtcggaccgacaacgccgacaccggcattcaaaatcggcgaaaaaaccagcgatccgctcacaatgtacgccaacgatattttaacgatccctgtcaacctcgcgggtgtgccgggaatcagcgtgccatgcggatttgcggacggactgccgctcggactgcaaatcatcggaaaacacttcgatgagagcactgtataccgcgtcgctcatgcttttgagcaggcaacagatcatcataaagcgaaacctgaactgtaaggggtgaaatgaagtgaactttgaaacggtaatcggacttgaagtccatgtggaattaaaaacaaaatctaaaattttctcaagctcaccgacgccattcggcgcggaagcgaatacccaaacaagcgtcatcgacctcggctatcccggcgtgctgcccgttttgaacaaagaagcggtcgaattcgcgatgaaagccgcaatggctttgaactgtgaaatcgcaacggatacgaagtttgaccgaaaaaactatttctacccggacaacccgaaggcatatcaaatatctcaatttgacaagccgatcggcgaaaacggctggattgaaatcgaagtcggcggaaaaacgaaaaaaatcggcattacccgtcttcaccttgaagaagatgcgggaaaactgacgcatacgggcgacggctattccctcgttgacttcaaccgccagggcacgccgcttgtcgagattgtatctgagccggatatccgcacacctgaggaagcttacgcatatctcgaaaagctgaaatcaattatccaatacacaggtgtttccgactgtaaaatggaagaaggttcactgcgctgtgacgccaacatttccctccgtccgatcggccaggagaaattcggcacaaaaacggagctgaaaaacctgaattccttcgcgttcgtgcaaaaaggacttgagcatgaagagaaacgccaagagcaggtgcttctgtcaggcggagtcattcagcaggagacgcgccgctacgatgaagcgacgaaaaaaaccattttgatgcgtgtcaaagaaggttcggacgactatcgttatttccctgagcctgaccttgtcgagctctacattgatgacgaatggaaagaacgcgtaagagcaaccattcctgagcttccggacgagcgccgcaagcgttatatcgaagagctcggtctgccggcctatgacgcaatggttctgacgctgacgaaagaaatggctgatttcttcgaagaaacggtcaataaaggcgcggaagccaagcaggcatcaaactggctgatgggtgaagtgtcagcttacctgaatgccgaacaaaaagagcttgaggatgtcgcactgactcctgaaggccttgccggcatgattaagctgattgaaaaaggaaccatctcgtccaaaatcgcgaagaaagtctttaaagaattaattgaaaaaggcggcgacgcagaaaaaatcgttaaagaaaaaggcctcgtgcagatttctgacgaaagcgtgcttctgaagctggtaacagatgcgcttgacagcaacccgcagtcaattgaagacttcaaaaacggaaaagaccgcgcgatcggcttccttgtcgggcagattatgaaagcctcaaaaggacaggccaacccgccgatggtcaacaagatcttacttgaagaaatcaaaaaacgataaaaaaagcagccgcctctaagggcgctgctgacacggagaccggtaagcgccggtctcttttttataagctgaaataggtttcaatggaagcccgcagcgtttcaatctgctcatttccgctgcctgccaagttggacagcattcctttaataatcggttttcgcggctcttcctttgcgtattcctcttcaatgacttcaagcgatacgaggacgtcctcaggcagcccctgctgtgcttttatcttttgaatatccgcaagcagtctttctctgtccgccgccggctgagtgaagatatcctgcggcagcagcggatcgggattgtctcttatcagtcccgtaatcaggtcatcgattctggcaatcagaaaggccgccacgttttccgtccggaatgccgtatgttcattaaaaatcaagaaatgaatataggagctcactattccttgcgccataacggacgcatccgctataaacggtatgacggcatctctgtaaacggagagcaaagcatcccggtacagtatgttaaattgaatattggcctcatgaaaatactgtttgaccttttgattttcaggaatgaccttttcgctcagcaagagaatgataaagtccttgtgctccataaattcctggaattgataagcgatttgttttcggaatacgtccttaggcgatttatgctgatgttctgttttgattttctttatttcttccatagacatgccgatgtaatactcacatgctgagagcaaaaggtcttcttttgatttaaaatgaagatagaaggccccttttgaaattccgcattcaccggcgatttcctgaatggttgttgaagaaaacccttttttggcaaataaatggatgcctgtttttatgattttctcttttttttcgttcatgacgtgcttccccttaatcctgaaaaatttagaaaaatttactgccttattagttgacgatgttgagttataccgtttagtattatatagaatgaccagtcagtcaataaaaattaacggaggacatgatgaaccacattattaactttgtactgaagaacaaattcgcagtttggctgatgacgattatcgttactgtagcagggctgtatgccggtctgaatatgaagcaggaatccataccggacgtcaacatgccttacctctcagtaaatacgacttatcccggagctgctccgagtcaagttgcggatgacgtgacaaaaccgatcgagcaggcggtgcagaatttagaaggagtgagcgtcgtaacgtccacatcctctgaaaacgtctcatcggttatgattgaatatgattacaacaaggatatggacaaggcgaaaaccgaagtcgctgaagcgctggacagtgtcagccttcctgatgacgcgaaaaaacctgacatttcccgttacagtctcaactctttcccgattttgacgctcagtgtgacaagcggcaaaagctcgcttgaagatctgactaaaaatgtggaaaacactctcgttcctaagcttgaaggcattcagggcgttgcgtccgtacaagtttccggacagcaggaagagcaggtggaattctctttcaaagataaaaaaatgaaagagtacggacttgatgaagataccgtcaagaaagtgatccaaggctctgacgtcaatacgccgcttggattgtacacattcggcaacaaagaaaaatcagttgtcgttaacggaaatattacgtcaattaaagatctgaaagagatgagaattccggtcacatcttcttctgccgctcaaggtcaagcgggcggagccggtgcggcatctgcggcggacgctcaggctatgcagcaggcacagcaaagcgcgtcagcaggggtgccgacagtcaagctctctgacattgccgacattaaagatgtgaaaaaagctgaatccatttcccgcacgaacggaaaggacagcatcggaattaatatcgtaaaagccaatgacgccaacacggtagaagtggccgatgcgattaaagatgaactgaatcaatacaaaaaagaccataaagggttcaagtacagctcgactcttgatatggcagagccgattacagagtcagtggatacgatgttaagcaaagcgattttcggcgcgatttttgcggtcgtgatcattctcttattcttaagagatattaaatcaacgatgatttctatcgtttccatcccgctgtcactgctgattgcacttcttgtgctgaatcagcttgatgtcacattgaacataatgacgctcggtgcgatgacggtcgccatcggacgggtagtcgacgactcgattgtcgtgatcgaaaacatttaccgccgcatgaggctgaaagatgaacctttacgcgggaagcaattggtgcgtgaagcgacaaaagaaatgtttaaaccgatcatgtcatcaacgatcgtaaccattgccgtattcctgccgcttgccatggtcggcggacagatcggcgaactgtttatgccgtttgccttaacaatcgtcttcgcgcttgccgcatcactgttgatttcgatcacactggtgccgatgcttgcgcacagcttattcaaaaaatcgctcacaggcgcacctgttaaagcgaaagagcataagccgggcagattggccaatttctataaaaaagtgctgaattggtcattaagccataaatggattacatctatcatcgcggttctgatgcttgtcggcagtttgttcctcgtacctctgatcggcgcgagctacctgcctgcgcaagcggacaaaacgatgcagctcacatacacgcctgaaccgggcgaaacgaaaagcgaagctgaaaaagctgcgcaaaaagcggaagatatgctgcttaaacgcaaacatgtcgatactgttcagtattctttaggatcgcaaagtccgctcggcggaagctcaaacggcgcattgttctacgtgaaatacgaggatgacacgcctgattttgacaaagaaaaagacaatgtcttaaaagaaatcaaaaaaacatcgagccgcggcgaatggaaatcacaaaatttcagttcgtcaggcaacaacaacgaattaacgtactatgtgtacggagattcagagtctgatattaaaggcacggtcaaagacatcgaaggcatcatgaaaaaggagaaggatctgaaagacgtcaactcaggcctttccagcacatatgatgagtacacgttcgtcgctgaccaggagaaactcagcaagcagggcctgacggcttcgcaaatctcccaagccctgatgtcccaaacgtcacagtctcctttgacaacggtgaaaaaagacggcaaagagcttgacgtcaacatcaaaacagaaaaagaccagtataagagtgtaaaagaattagaggataaaaccatcacatcacctgcaggccaagaagtgaaaatcggcgatgtggcgaaagtgaaaaacggcacgacatccgataccatttccaaacgcgacggcaaagtgtacgctgacgtaacggcaaccgtcacttctgacaacgtcacgaaggtgtcatcagccgttcaaaagaaagttgacaaactggataagccggacaatgtatcgattgataccggcggtgtatcagcggatattgcagattcctttacgaaactcgggttagcgatgcttgccgcaatcgccatcgtatacctcgttcttgtgatcacgttcggcggagcattagcgccgtttgcgattctgttctcgcttccgtttacagtcatcggcgcattagtcggactgtatgtatccggagagacggtcagtctgaatgccatgatcggtatgctgatgctgatcggaatcgtcgtcacaaacgcgattgtcttaattgaccgcgtcatccataaagaagcggaaggcctatcgacgagagaagcgctcctggaagccggctctacgagattgcgtccgattctgatgacggcgatcgcgacaatcggcgccctgcttccattggcattgggctttgaaggcggaagccaggtcatttctaaaggactcggtgtcaccgttatcggcggtttaatcagttcgactctgctgactcttctgattgtgccgatcgtatatgaagtattagcgaaattccgtaagaaaaaacctggaacggaagaagagtaagacagcgggccttggctccttaaacggagccggggccttttttcttctggcaattcctgtacatattgttgcgattttctcaagtcatagtataattaaaggttgttagtgttaataatggatcggatactcttaagtaggatgatgagataatgaaacgtgcacgcataatatacaatccgacttcaggacgggagcttttcaagaaaaatcttgcccaggtcctgcaaaaatttgaacaagccggttatgaaacctccacccatgccaccacatgcgcgggggatgccacccacgccgcaacagaagccgctttgcgggagtttgacctgattgtcgcagccggcggagacggaacgattaatgaagtcgtcaacggtcttgcgccgttagacaaacgcccgacactcggcatcattccggtcggcacgacaaatgatttcgccagagcgctgggcattccgagagagaatatactgaatgccgctgataccgtcattaacggcgtggcccgcccgatcgacatcggacaggtgaatggtcagtattttatcaacatcgccggcggaggccgtctgacggagctgacgtacgatgtgccaagcaaactgaaaacgatgctcggccagcttgcttattatttaaagggaatggaaatgttgccttcacttcgaccgacagaagtcgagattgaatatgacggcaagctgtttcaaggcgaaattatgctgtttttagtgacgctgaccaactcggtcggcggattcgagaagctggcccctgattccagcctgaatgacggcatgtttgatttaattattttgaaaaaagccaatctcgcggagtttatcagagtcgcgagcatggcgctcagaggcgatcatattaacgatcagcacattatttacacaaaagcgaaccgtgtgaaagtcaatgtatcagaaaagatgcagctgaacctggacggcgaatacggcggcatgctgccgggcgaattcgtgaatctgtaccggcatattcacgtcatcatgccgaaggagaaagcggaacagctggatgactaatacgcggacaaaatcctaaaacagtattcgttttaggattttgtcatcttttcagcgtgatcggaaacctttgaaggctgacattgaatttgaaggtttgccagcacgctgaaacaaggcttttggtaaaacgagaggtgattatagatgaaaatgaaacccccgatagaaaaaaatgaatactatgacgtgacatttgaggatttgacgcatgaaggagcgggcgtcgcaaaggttcagggcttcccgatcttcgtgccgaacgccctgcctgaggaaaaagcgcaaattaaagtgacacgcgtcaaaaaaggcttcgctttcggccgtttgatcgagctgaaggaagaaagcccgcacagaacggatgccccgtgcccgatctacaagcaatgcggcggctgccagcttcagcacatgacctatgaaggccagctcttgtttaaacagaaacaagtcaaagacgtcttagaacggatcggcaagctggacctctcaaacgtcaccgtgcacccgacgctcggcatggaagacccgtggaactacagaaacaaagcgcaggtgccggtaggagaaagagaaggcggactcgtcgccggattctatcagcaaagaagccatgacatcatcgacatgagcgcctgcctgattcagcaatccaaaaacgatgaagccgtccaagccgtcaaagacatctgtgcagcatacggtgtcaaagcctataacgaagaacgccacaaaggctggcttcgccacatcatggtcagatacggcgtcgtcacgggcgaaatgatgatcgtcttcatcacaagaacaagcgattttccgcacaaagcgaagatcatcaaagacattacggcgcaattcccgcacgtcaaatcgatcgtgcaaaacatcaacccaaataaaacaaacgtcatttttggggacgaaacaaacgtcatctggggcgaagaatacatctacgacctcatcggagacgtcaaattcgccatctccgccagatcgttctatcaggtcaacccggaacagacaaaagtgctctacgacaaagcgcttgagtacgcagagctgcaaggagaagaaaccgtcatcgacgcctactgcggcatcggtaccatttctctatttctggcgaagcaggcgaaaaaagtgtacggcgtcgaaatcgtgccggaagccatcgaggatgcgaaacgcaacgctgagctgaacggcatcacaaacgcggaattcgcagtcggagaagcggaaaccgtcattccgaaatggtatgaagaaggcatcacggccgatacgctcgtcgtcgacccgccaagaaaaggctgcgacgaagccctcctgcggacaatcatcgacatgaaaccgaagcgggtggtgtatgtgtcctgcaatccaggcacgcttgcaagagacctgcgggtgcttgaggatggcgggtatcagacgctcgaagtgcagccggtggatatgttcccgcatacgaatcatgtggagtgtgtggcaaagctagtattgaaataaagcagtgttctcttttggagaacgctgctttttatattaatatgtgaaggatcctttttaattattaagtacaaaggtcatattaaaacagattaatttgaagaaaaatggtattctcaatatagctcaatttagttattttgagcggcgaatttatagagataacgcaaaaagttaatgaaaaggtgaaacaatgatagtctatgaagctacaaaagaagagtttctgagtgatgtgtttgacgacaatttggtgacgaatatctgtaaaaactataatgataagattggcaaaatcaatgagaaagaggttagatcttgggataactctatgcagtatatgtatagggtattaagtgatagagaaattcctaaggacgcaggaattgctattgagttcaaaataccccatacttcaaagcgtattgattttcttatatctggatcagataaggatgatcgttcatctgttgtgattgtggaacttaaacaatgggagaaagtagagaaaattgatagtaaagaggccatcgttaaaacgtttataaataaaggaattcgcgaaacaacccacccatcctatcaagcctggtcatacgcttcgttaataaaggattacaatgaaaatgcgcaaaaagaagatatcaagctatatccttgtgcatacttacataactacttgaatcagggtacagacgatccattaactgattcaatatatgaatattatataaaagaagctcctgtttttatcaaaggtgattcaggtaagcttcgtgatttcattaaaaagtatattaagtatggagacaacaaagaaatcctatatacaatagataaaggaagaataaggccttcaaagtctcttcaagattcgttaaacagtatgcttcaaggtaatcgagaatttatgatgattgataatcaaaaagttgtgtatgagacggctttacatttggcgaatgaggcattacgtacaaacactaaaaaagtattaattgtagaaggcggaccaggtacaggaaaatctgttcttgctataaatttattagtagaagcaacaaaccgaagtcttgtggcacaatatgtaacaaaaaatgcagctcccagaaatatatatgctactaagttaaaacaaaactttcggaaagggcacattgataatttatttaaaggatcgggcagttatgtcaatgctccatcaggtgaatttgacgttttaattgttgatgaggcgcatcgattaaatgagaaatccggtttatttaataaccttggggaaaatcaaattaaggaaataataaatgcttccaaactttctgtttttttcatagacgaacatcaaagagtaacattaaaagatattggtagcactgatacaatccttaaattctcaaaagaattagatgctcaggttacaaatatgaaactggattcacagtttcgttgcaatggttcagatggttatataagctggttagatgatgttcttcaaattcgggaaactgcgaattctaattatattggaatgaactacgattttcgtatatatagaaatccaaatgaattgcgtaaacagatagaagatctgaataaagttaataataaagctcgaatagttgctggttactgttgggattgggtgaaggaaggcaaagctaaaacagaatttcatgatatcgagattcctgaatatcaattcggaatgagttggaatttaaataactcagacacgtgggcaattgatgaagattctattaatgaaataggttgtatacacacatgccaaggtttggaatttgattatgtaggtgtaattataggaaatgatctagtgtgcagggacggagtagtattgactgatcattcaaagcgggcgaaaacagatacctccttacgtggtttgaagaaaatgctaaagcaaaattcagaagaagctgagaagcttgcagacgaaattattcgcaacacatacagaactttgatgacccggggacaaaaaggctgttttatttattgtatagacaaacaattagaaaattacttttttaaaaggctgaaacatatgcaaatgaattacaaagagaatgagttctttaagtcttcatcagttgctgaagaaaaagccacatataagcacaaatgaaaccttttttaattatttattaaaacggaattgggaaaaaatcacgctatgatcttgtacctttaaaaagcagggaggcaagattttgcgacaactgttaaaggctttttaacgaatgcgactaggatttctaccgttgttgcaggaaaagaaaaatctatttgtgtaggagatccttacaaagcttcttaacaaagtggcgattgttaatgacttggggaatgaaagcataatattaacgtaaagcgataaaaggcttcttttaagaagcctttttatgtacgtatatcttcataatcaagataattatttataaaaagataataaatttggataaaaatgagaaaatcctggcgggaatgacgatataaagttagtgaacaacggtatagaatcttatttttcgaggtgaacagaatgggagaagaacaagacattattacagtaaccgatctgcgcaaaaaatatggatcatttgaagcagtgaaaggggtatccttttctgtcaaacgcggcgagctgtttgcatttctgggaacgaacggtgcagggaaatcgaccactatcgatattctctgtacgctgattaaaaagacatccggaaaagtggtaatagatggttatactcttggtgaggggaaagagaataatcatatccgcaaaaagatcggagttgttttccaagagagcattttggatgaacgattgaccgtttatgaaaatatcatgaaccgcggacaatattatcatttaagcaaggcacaagtgcaagagaactatcagtttgtaacagactatttaaaattggatgatattaaggagaaaaaatacagcgatttgtcaggaggacaaagaagaagagcggatattgcccgtgccatcatccataaaccgactatattatttttagatgagcctactacaggtcttgatccgcaaacgagagtatttgtttggaatgcgattaaaaggctgcaggaagaaacaaacatgacgatctttttaacgacccattacatggaggaggccgctgtggctgataacgttgtggtcatcaaagaaggacgcctgatcgcagagggtacaccgagtcagctcaaagatcaatatgcgtttgacagtctgcatatgatgtttaagcaaggcgttgatccgacggcatggtttgaaaataaacaactggattttacggttaaaaactctatttattcccttcgtgtagagtccactctccaagcgtttgacattttgaaaggtcttgaaggaaaaattgaatctttcgaagtgattaaaggaaatatggatgatgtgtttatccatattatcgaagaacaaggaagcagtttgccagtaaaggggagcattgcataaatgaagtctttatccagtttaatcagcagaaatataaaaatatacttccgtgatcgaacgcttttgcttctctctttgctgtcagtatttatcgtcattctgttatatgccgtgttcttacagcagacacagctggacgccattaaggccctggtcggttcgacagatgattccaaagcaatggtgaacgaatggatggtggcgggattgctgtccattacagctgtgacaacgactttaggcgctttcggaattatggtgaaagataaagaaagcaagagaacgtatgactttttaacagctcctttatcaagggcgaccatccaattgagctatgtcattcattcatttgtcatcggcttgatcttttctttcatcgcctttttaggctgtgaaatttttctcgtttcaacaggcagcaagcttttaagcggtacagatatacttgaagtattggggatcattattctttcagttgcactctcgagttccataaatttatttttaacgctgtttattcacacacaaaatgcattttcgacgttaagtacgattgtcggaacagccatcggttttttatgcggagtatatgtaccgatcggcggcgtaccggtgtttgtgcagaagattattatgtatttccctatcagccacaccgccgttctgttcagaaaagcgtttatgacagactcagttgataaagtgtttaaacatgcttctgcggaccaaatacaggaatatgaaaagcattacgggatcgtctacaagttaaacggccattttatcagtacggctgcgagcttgtgggtcattgtcattacagccatcatatttaccgtcatatctattttcatatttaaaaaacaaaataaatgacttcttcagacgatacataacgatgtaacaggcagcatccgtttactggatgctgcctgttttgtttatcattattctttttgtgctcaattcttaattcctcaaaaagttctcggatttctcttgaaaagtgttgaagatatctttatttacactgtatcaggctggtagatcttgcgaataaatcagttgacgtttttttggtgtcttgaagtgaaagagaaccatgggagagtcatctaatacttctgcataaagatatatttttgcccattcataaggtatgatgtagttataaaaaatagcccagcaaggaagtgctgagccattattgacttatagaccgacgtagtttattacaaattctttatcgtcctcatcttcaggcaaaatccccaagttttgatattcccataccacttgccgttgtgttccgtttaagtctgaggcgatgacatcggtgtaatcgtagtcaattgagaagaatttaccgcttcgttcgagatgcaaagtgaggtttgtccataagtcctcgttgtttgttttaaattgatcccgtaactcttcaaagtaatcttgcaattcatatagaagttcgtcatatatatcttcatcaacattaaaatgttcaggaatatcgtgtgaatatatatattcctgattttgtggagtactaaagaagaagtaaacttctgaagaatcatctaaaatttcggcataaagagcaaccttctcccactcagaggggataatttcatttatttgctcagcgattttttgatatagttcgcccattttttcagtttccacaatatcagaatcctttttaattttttttagccgtttgaaagcttattatatgtttagatactcttctatgaattttctatcgtcctcatctttaggcaaaatccctaaattttgatatttccaaacatctcgtctttgaaggtcatcaagttcagacaataaaacatcctcatcgttataatcaattgaaaactttccggtgttttctaattttaaagtgagattagtccaaatatcttggttgcctagtttaaattcttcttttagttcttcaaatagctcttgaagttcaatcagcagttgatcgtaaatctcttcgcttactttaaattgttcaggtatataatgagaatataagtaatcaccattagttggtgttgtaaaataaaagtatatatccgctgagtcatcaagtatttcagcatataaaacgatcttttcccattgagatggaatcatttcatttagatgttcagcaatcttttgatatagttgttccattttttcagctaccattgatgatcctctacctttgttgatagcattatttaatatttagataatccttaacaaattctttgtcctcttcgtcttcagggaaaatccccaagttattgaactcccaaatcatttgtctttcgtattcgtccaaatcagattcaataacatcttcataatcataatcaattgagaacgttccatcgctttcaagattcagtgtcaaatttgtccatgctttagggttattttctttaaattcagtgtgtaactgcataaacaactcttggaggtctagtagtagtccggtataaatttttttactgacctgaaattgttctggtatgtcatgagagtatatatattcatcgttttcgggtgtttgaaagaaaaaataaacttctctggaaccgtctagtatttctgcatacagaacaactttgctccattcagaaggaattatttttcctaagacatcagttatttttagataagctttttctaacatcattatcccaactttattaaattggattttcaggatattcatctaaatattttttattaatttttgtaatgatggatccttaggttcttcccttaagtatttgaatttccagatgataagctgatcactgaaactataatctgtcttaaaccaatctgtataatcaaagttgacagttaattttccggatctttctaggctaagagtgaaagaataaaataattcttgatcatgatctttgaaaacatctctcattttttcgcttagtttaaataattccatctcatactgatcgaattcattttcgtcaatatcaaattcaaacggaatttcaagactgtacttaaaataattaggttcattttgagaattgtaaaaaaagtaagtgcctccgcctgtctctgaatctgagcatagaacaaaaatttctcccatggttctggtatcatttcgttaacgatttcagctatgtttctatataatgcatttaattcattttccaacaaggatcagcctccagcattataattggtaatttgtaaggatcatttgtatcaaaaaaacccccaataaaggagggggaattttaattttgagaatttaaatactgttctaaaaaggattttaaaggtttactcttaggataaattcctacatttttataagtccagattgtttgtctttgagagatggtatatggagattgaataacgtcttcataattatagtctatcgaaaattctccgcttatccccagattaagtgttagattagtccatatatcttgattgttttctttaaattcatctcgtaattcctcgaataagtcatgcaagtcaaataacagctcctcataaatctcctcactgacatgatagtgttcagggatattatgagaatatataaaatcttcactatgtggagtattgaaataaaagaaaacttcagatgaatcgtcaagtatttctgcataaagaataactctttcccattcagatggaatgatctcattaatgctttctgctatcttttgatataattgccccattttttttgtctccatattaacctccggcctgatttttgattctcataagtttagcttcttgatcaccaattttatatttcaccctaaaagcagtaggtcttaatgaatcacctttatacaatgcattaatttcaactgatactttttggggagggtctgcttgcaaagccgatgcccaatcttgctccattttgtaccatttcccgccgctcctattaatctgagaattcatcggcacgatgttgtcgaattggcctgagcctttgaattgggtggcgattaggtggcctccgtcgtcatctgtcagacggtctggtttacctgcttttgattgcgcatattggttgcgttttgcttctcccagctgcaagtctgctttgacacttgtaattctaccatagttgtcagtggtgtacgtgtagccttcttttgttttatagatgacattcggcttcaatactttctttctggtccatttcgcaaaatgctcgccgtatttgaccgttaccggcggtacatgcggtgccggtgtccgtctgccgcttgcggaggttccgtacggtttcggcaggatgaccttggcgaatttctgaagtccttctttaagtgtgaccccgttgactgcgttgtaaggaacgcccgccggcactacgtcgtgacgcggatgatacgggagaatatcagccagggtgagatctccgatttgatgtaacttggttttgacacgtttttttgatacttctatgcctgtgtttactttttgtttgatgtgatcaacggtttgttttgagaccgttatcgctttttgtgctgcggcggatttgcgtgctgctgttttgactttggttgtcactttggcggctgttcctgtttttgagacggcgccgacgccttttgtgccgacaactgatgtcacaacggtgcccactgcatatgacacccatcttgctcttgagtaggtgtcgccattcaccatgtctttttggtacgattcttcgattgccgctgaaatggcttcatacgtcttgatcgggtgagccgccgctcctgtaatggcttcaaccgttccgcccggatctgtgacaatatcccacaggcctgtgaccgcgtcttttccggaatcataaaggccgacggcaacgcctttgaaaccgtctgtaagttcacgcgtgttttcaatttgagtgaagtagcgctgctgttcttttgtcaggtttttatagccgattgttttggccattgagtagaattcatcagcattcgcataatcgtagtttttcagtctttctttcagtttttcaatctctcgttccttcgcttcctctttcttcatcttcaaataagcatccgaatgtcttgcaatctcgccttttttcttatggatgtcgctttcacggtacgccttggcgttgtagtgaagcggcgtggcgctttttcctttgcccgtggcattttgaagctgctggaagtcagcttggatgaactgttcgttcgcttcggtttctgcgtattctttcgttagatcgtgatcaagcttgccgagcttatgtatcgtttcgcttctttttttgtcagctgaagaaagcttctgatctgtgctttccgttgaaaacagatcaagcgagatgatgtcatcgatctcaccgaggatggagcgcatgtcctttttctgctcttccataatcgcctttgatttactgagggcgtgggtgagctcatgctccagaaatgattcctccacatgcgaattggaaagtccggcatcttcgaccttaccgggaaggcttgtgagaaatgcgattttcatgtcgatcagatcaagccagctgtctgtgacgccggcgtggtcctggaaaaaggctttgatgttatctgcgccccgaccagagaaatcgccgtcaccgagatcagccacgccttgaaatgcttttttcagattaaccatctgaccgcgcagttttttgtattcacccgcgcgctgtttggcagcggccagcagggtggttgcttcgaaaactttcatgaccatatcctttcttttgttcgatatcaaaattttaccacgggagtcaggatatacagtgtaggaaataggtaataagaataaaatgaatcttttgacttgcgacttccttcctgtatgaagggaggcttttttatgttttgtacaataatcctcaaattcggcttactgcgctccggtgattttaagcgtgcctgttttttctaatgtcttacactcgaaacaacccaaccgctgaggtataatagaagcagagtatttatcatacagattcaattcgtgaaagagagtggaacaaaatgggccgtaagtggaacaatatcaaagaaaagaaagcatcaaaggacgcaaatacgagccggatttacgcgaagttcggccgtgagatttatgtggcggcaaaacaaggcgagccagatccggaatcgaaccaggcgttaaaagtggtgcttgagcgcgcgaagacgtacagtgtgccgaaaaatattattgagcgtgcgattgaaaaggcgaaaggcggcgcggaggagaactttgacgagctgcgttacgaaggtttcgggccgaacggttcaatgatcatcgttgatgcgttaacgaataatgtaaaccgcacggcgcctgaagtgcgcgccgcattcgggaaaaacggcggaaatatgggtgtgagcgggtctgtcgcttacatgtttgatgcgaccgccgttatcggcgttgaaggcaagacggcggatgaagcgctggaattgctgatggaagctgatgtggacgtgcgcgatattttagaagaggatgacagtgttatcgtgtatgctgagcctgatcaattccatgccgtgcaggaggcattcaaaaatgccggcgttgaagagttcacggttgcggagctgacgatgcttgcgcaaaatgaagtcgagcttccggaagatgcgaaagctcaattcgaaaagctgatcgatgtgctggaagacctcgaagacgtacagcaggtttatcacaatgtagatttaggcgaataaagacaaaaaggccggggcggcataagttccggcctttttattttgcttatgcggccggcctgtatcgtatttctccgtaagcaattattgattatttcgccaaaactgggcggatgcccatacgtttccttccgcatgtcataaactggactgtaacctatgtgaaggagcgataaatcatgaatgaaagaagaccgatttacggcggaggctatggcggctacggaggctacccggggtacggttttggcggctacggtggctacggcggcttcggaggatatccgggatacggtttcggcggaggctacggctacccggggtacggttttggcggttacggcggttacggcggttacggcggttacggcggttttggcggctacggcggcttcggaggatatccggggtacggttttggcggctatggcggaggctacggcggctacccgttccatcaccatcatcatcgggacagccaatatatctgaccattcgggaaaagcactcttggaacagcaagagtgctcttctcatgttcttgcagctgtggtacgattggagcaaaatcatcaagtacatatgacatttctgtaaatcatgagcaagttgtttataaactgaaaagcatgatctgtaaaaatctctttatcgggaggttttacatgtgagaagtgaagacgaaatgatgaaattgattcttgatattgcgatgaaggacgagagaatccgtcttgtcactttagagggatcaagaaccaataaaaatgtaccgcgagacaaatttcaagactatgatatttcttattttgtgaccgatatggactcttttatatctgatgaaagctggctggatcagtttggcgaaagaatgatgatgcaaaaacctgaagatatggaacttttccctccggaactcggagactggttctcctatctcatgctttttaaagatcatcataaaatcgacttaactttgatccctctgagtcaaacagaggattattttacacagagtgatggtttggcggaaatattattagacaaggatgaccgaatcaacagtaagatgattgcgagtgatgaacaatatcatataaagaaaccgacccccggagagtttgatgattgctgcaatgaattttggatggtttcaacctatgtgattaaaggattaatgcgcaaagaaatactgtttgcgctggaccatatgaatgacattttaaggcctaatgttttgcgtatgattgcgtggaatattgggatagagcatcagttttcattaagtgtagggaagaattataagtatattcaacattacatgaatgcgaaagattgggaaattctgctgaatacttatgtcggcaatacttatgaaagcgtgtggaaggcattgtttgactgccaaggtctcttcagagcatattcaaagtcagtggctgttttattgagatacgaatatcctgaatatgatcagcaaattacggaatatacattgaaacattatcagtgctttcaatcagatttttcattatgatttttttacttcaaattccagatgagctgcatggagtccgtttttaacgggcttttttattttcttacagggcataaatgctgatacggattcatacctattaaggtcatgtgtttaggaaaggaggatcgtaatgaaagaaaatcagccgtttacaccggtcaaatcctataaacccttccacagccggtttgatccctgcccgccgatcgggagaaaatactacagaacgccgccgcatctttatatgcggtttcagccttatcacttggagcagttttctccgatggaggcattaagaaaagggaccctttggaaggatctttacgatttctatgataatccttatcgggggggaatcgaatatggcgaaaaagattgatgatgaatactatcggctgctggagcaaattcaggcggcggactttgtcttggtggagctgacgctttatctggatacgcatccccatgaccgtctcgcgcttcagcagtttcatgaatattcccggtactcaaggcagctgagaaaacggtttgagcctgagtacggaccgcttctgcaattcggcgtgagtcaggccggcgctcaatgggactggggccgcggtccttggccatggcaagtataaggagggatctgtaaatgtgggtatatgaaaaaaagctgcagtatccggttaaagtgagtacgtgcaacccgatgctggctaagtttctcattgaacaatacggcggggcggacggcgaattggccgcagcgctccggtacttaaaccagcgctacacgattcctgacaaggtgatcggcctgctgacggatatcggcacggaggagtttgcgcatttagaaatgattgcgacgatgatttataagctgacaaaagatgcgacaccggagcagctgcgtgatgcagggctcagtgatcattacgtcaaccatgacagcgcgctgttttatcacaatgcggccggcgttccgttcacagcgtcttacatacaggcgaagggagatccgattgctgatttatatgaggatattgcggctgaagaaaaggcgagagcgacgtatcaatggattattgatatttccgatgatcctgacctgaatgattcactccgttttctgcgtgagcgtgaaatcgttcactctatgcgtttcagggaagcggttgagattttaaaagaagaacgtgataagaagaaaattttttaaacggccctcaaacatgacggctgtttttttcctttctgcgtttggtctataataaaggtgtcgaatattctgattacaggaggattttatgacaccatttacgattacggaggagaaggcgggggcattccgggtcacctccgcccggaaggatgatgaagaagaagtcatggatctgctcgtgcaggcggcagaatggcttcgcgataaagggtcgaaccagtggagcggccttctgcaaggggaagatacccacaatatgcgggaggcgatcgccaaagggtatgtttttttattcaggcagaatgaagagctggccggcgtcgtcatgctgcttcccgaagcaagcgggtgggacagacgtctatggggcgatgaaggacatgaggagtccgtatatctccaccggctggcgattaacaggcggtttgcaggggcggggctcggccggacgatcatgacttgggcggagacgggggtgtcttgtcctggaaaaacgaaaatccggctcgactgcgtgtccggaaacaaggcgcttcagtcgttttacagcggaatgggttacgaatcaaaaggactcgcgccgggttatcatttgtttgaaaaaaaggtgagcaaataaaaagctcctcatgacggaggtgcaaaagacatggggtttttttatctgatctgtctggccgcattttgtcttaactttgccgtatcggctgtgctccgtaagaaatggccgaaaaagatgtggcctgagtggcttttggcggtgctgggcctgactgctttcggtacggttgtttacagcattttcggtgtcggcggctgggaaggcatgggcttggggcttgccgcgatgtttacgggttccggagcggccgccggttatgccgctgaggtatgcttacgggtcgtcagatcgaatcaaaaacagtaagcagaagtgaaaaaacgcagcctcgtctgcgtttttttgtgtattgccggccgctgtatagaaaacaggcgaatgtccataatggtaatgacttttaagaagaaggtgcgaatatgggacatttacttacagtggcttgggagttagtatgcggcttgggtattttatttgtgattttaaaattgcttggaaaaactcaattctcacaaattacgccgtttgattttatttccgcgctcatcctcggcgaactggtcggaaatgcggtgtatgataaaggcgtcaggattattgaaatcatttttgcttctctgttatggggggttttaatttatctcatcgaactgattacgcagaaagtaaaaagctccagaaagctgttggagggcgagccgagtattatcatacataaaggaaaactgaaatatgatgtgctgaaaaagaataagctggacattaatcaattgcaaagccttctcagacaggcgaattgcttttctatacaggaagcggagtacgcaattttagaaacaaacgggatggtcagcgtcctgccgaaatttcaatatgacacgacgaaaaacggcgacatgcaaataaagccgaagcaagtctctttgccggtcacgctgattattgacggcgaagtgctgtatgaaaatctgaaagaagccgggctggaagaaaagcagctgaatcaggagctgaaaaagctgaacatcaaaaaaacggaggacgtgctgtatgcggaatggaagcccgataaaccgctgtttgtcctgccgtttgaggagaaaaaataaaaagagcattgccctggggcaaatgctctttattatttttcgtgtacgcctgttttaacggctctgacatgatacataccgacatccgtcccaagcatataatcaggtttcggcttgccttggtttgctttgtgggccgcgatgtggtcttcgcttttttcccattgtttccaatggtcttctgactcccagcggattaacacgacgacttcttcatcaccgcggcggacttttttttccaggaccgttacgtctatcaaaccttcctgcttttcaatcacgccttctgaactgaagcgttcgattactttgtcggcatgtccttcttttacggtcatgtttctgatttgcacaaacatctggcagctctccaatcctttttacgttttatccaacattttaaatgaaaatgattctcaaagtcaattaagatgcctgacggattacgatttcaggagaaagacatgaccatcctcatctttaaattgcacgaagctgccccattccatttgtttcggttcatctaaaaaggtgatgccgttccttttcatctgttcatatgcggcaaagacatcttcacactcaaatacgatagaagccttcatatgctcggcgcctttcatcatcgatttcggataaataaccaaatgagtggcggcccctttgggcgctacctcaagccagaaggcgcccggtcccatcggatgctcggcgacggtttcaaaccccgctttttccgtccagaatgttttcgctttttgctgatcatcagtgtatacggcgactgtcgcgatttttttgatcatcatactgacctcctgtttcatttcttttatagtgtatcctcctgccgaaaaaagcaatcaaaagcttaatgtgcaggtttttttaatttctctagtgcgatcggtgattccgatttataatttagacaaaagtacatattcttgaaagaggagacggcagtgaacaaagaccaattacttcatgattatattattacacattcggcagagctgacggaaaaatggctcaagctgagacggaagctgagagggcgtttttattctgcggatcaattaagtgaggaaatgaaacggctgctgatcgagcagcatacctttacaaacacggtcatcgcaagcgcttttttggaagatccggccgtttttcagcataacaaagaaaaatgggccgctcaggtagcgaaaagcagagtggagcaagacgcggaggttcatgaggtcgttgaggcgatcggcaattcaagaaccgtcttttgggaggcggtcacccgttttatggatgagcatcaggacattgtaacaaatgaggatgcccgccgctggaattaccttgtcaacggctcgtttgatcagctgatgacggattttactgaacagtttcagaaattaatgatcgcgaggctgtcatctcagcaggagcttatttccgaattgagctgtccggttattttgatcgcggatacgatcggcactctgccgctcatcggcgcgattgatacgagacgggcgcgtgtgattttggagtcggtgccggaaaactgtgtcgccaaacggatcacaaaccttgtaattgatctgtccggtgtgcccattgtcgatacgatggtggcgcagcaattgtatatgctgtcgaaaacgttatttctcctcggcatcagaaccgtgttttccggcattcggcctgatgtggcacagacttctatccaattgggacttgatttttcagagtatcaaacttacggctctctggagcaggcgctcgccagcatgggtgtcacatgtgtgatcgaggaagcaaaagcatagaaaaaaggtgctccgtccagaggcggggcgctttttttgtcagcggaaaacaatttaaatatgtcggaacgtgaagattgcgttcttaaaaacagcaatatgacgccttgggggcgggcgtcggcgacacggtttatgtcaaagcaaaggaagtgaaagttttcgcaaagaaaacatatccgaaaattgtgtaaatgctgttgatttctgaatgaaaacataatagtataattatatatttcttatcagaatagtatggattaaaacactcattgtcaaaagacgaacgtccagacataaagggggagcatgatgacgtccaaaggaaacgtagatccgcatgtgatcgaaaagattatcagtgcgctggaaacgctcgatttcgggactgttcagattacggttcataattcccaagtgacacaaattgataaggtggagaaatatcgattttccctgaaaagcaaagaagtaaaacaatcttaaaaaacagccaatgacaggaggcggtacatatgaagcattcaactgttcctttccgggagagccggtatctgcacctgcccgaagtgcgctttctgcattggtgcacgaagcaatacggcataaataaaggcgtgctcaatacaattgacggctggttttatgatgcgggcgtcattccgattcccgtcaggcgtctttatgtgctggcattccttgatttcgtgaaaacgccggggcagaagggaaatatccgattcgggcacggcggattgacgaaaaaactgcatgatttcatggatatgcaggagtgcgcagcgaaacgtcaggcctgacatccttaaaatcttcttaaaatcatgcaaatttctcccattttatttataatagacctatcacgatcattttttgggaggacttttgacatgcaaactgctgcttatgagagcaaacaatctattatgcagcgcattatcacggtatttgtgtttacactgttagttgcgacaatcggcctgtatacgggccagttcattccgccggcattgatgctgccgctgtcggtcttggaggtcgtcatgatcatcgccgcattttggctgcgccgaaaaaaagccgtcggatatgtgtttgtcttttcattcgcttttatttccggaatgacgctgtttccgatcatcagccattatgcgtccgcagccggagcctatgtcgtattggaggcattcggttcttcgtttgtcatttttgcggtgctcggtacgatcggcgctaaaacgaaaaaggacttgtcgtttttatggtccttcttgcttgtcgctcttatcgcgcttctcgcagtggggatatttaatattttcagcccgctgaattccgccgccatgatggcgtattccgtcatcggaacaattgtgttttcaatgtacatcttatacgatctgaaccagatcaagcaccgggacatcacggctgacctgattcctttgatggcattgacgctttatatcgactttatcaacttgtttatcaacctgcttcggtttttcgggattttaaacagtgatgattaatcgcgcgaaaaaggcgccctgctaagaggggcgccttttgttaattttaagagttttgaatttttaatctcataagccatgagattccctttgtcatacgtttgccagctagaagtgaacggagggtttgtcataataacaaacctgtttcaaaaaatttgaaaggggaaggatattatgccttgtagtacagattatgcaacatatgtattgagagtttgtaccgatgcggattcttattctgcaaaagctacttctattgattgtgtagcatcatatgggggcgggacaatcgcaacatttgattattccatgacaattgatgtttggaacggttcaaaatgggtggctaatgaaacaaagaaaggttctttcagtcactcaacacctaaaaaagtatttaaactctcaaatcaaaaatcgttaaaaaaaggatcaaatagtgtgagagtgaggttgaagactaaaaatcgatatacaaatgtaacttccagcattaaaacacctgcatttatagtgaagagaaagtaattttaaaattatttcttctgaaacagcctgaacaaactaatgtgcaggctgtttttttataaccctcatctttttacttcaatttctatctcatagaaatttgcctttgtttttacaatactactttatgttctgtctccggaaaacagcagaagcttatcaaataaaacttcaagcatttttgtcaattccgctttttctccagcggtgaagctttccatgactcctgaaatgttggagaagtggccgggaagaaacagcatcagcttttcttttccttcccttgtaagttcgatgctgatttttcgtctgtcaccggtatgccggctgcggtttacaaagccgtcccgtgcgagtccgtcgatcaatccggtgatggtcgctttggtgacattggattttttcgccagctccgtcggactcaggctgtggccgggttcgtcaaacagaaacattaaaattttgaatttcccttcggacaatccgtgacttgagaaataatgctccatgacctgattcatttttttagacatatcaaataacgtcaaaaatgttttcaatgattcagcatccatatcggcgtaaatctcagcgcgtccggcaatctgcgagtaatccggcaaatgtctcaattccattttgtaagcctccgtaccattttagtgattcaaagtataagcttgccggattcaaaaggcaacctataaagattgacagtttttcagccaatatagtaaggtggctaatagttaacaaatgataaataaattgagaaggcggtatcgtgatgaaccatgaagtgaaaaagatcatcatagcgggcggagggatcggcggcctgtccgcagcgatttctctcggcagagcgggttttgaagtaaccctttgcgaggcggcgtccgacatgcgaaaaagcggagcgggcattcttcagcctcaaaatgcgcttcgggtgcttcgggaaatcggtgtgtatgatgaatgctgtcaacacggctttcaaacggattggctgaagcagcatgatgaaaacggaacgctgcagtttaaagtgagtgaggcgtttttagatgattcattgccggggcggaataatatattgcggcaaacattaaacgatatcctcagcaagcatgctgaggcggcgggggtcacgattctgcccggtaaaaaagtcgtgtcttacgaagaaacggcagatgaaataacggtgcattgtggagacggaaccgcgatgacggctgacatcctcgccggctttgacggcatccgctccgctgtccgcaatcacatgctgcaaagggaagtgaaaacagagtatctcggcatgggagcgcacagattttacatttcttttcccgagccggtttttcatgattcgacactgatgtataaaaaggggcagacgcaggtcggggtcgtgccgctctctgaaaaaacaggatacgtatttatcatccggccgtatgacgctgacttcagggatgacgaggacacgcgttttgaacgggtgagagacttgctgcgcggaattccgggagtgaagtttgtgacagagaatatgtcaaaggaatatcccgttttgtttcataagattgagcagatggcggtcaaagaaccgtggcacagaggccgcgtcgttctgggcggggatgccgtccatgcaggagcgccgacattggcgcagggagcggcgatggcgattgaagacgcgattgtgcttagtgaagaactgcaaaaacacgaaaaccatgaaactgcatgtcaagcatacttcgaaagacgggcggagcgggcattacaggtgcagaatctctcatctgaaatcgtccgccgcgagataaagggaacgcccggcgtccaagacatcatcggtgaatgctatcgattgctcaaagagccttattaaatacagaaagtccagaacatggcgtctggacttttgtcagtcttgttcagatttattccgtatccgctcaatcacctcatgcagcccctcaggcttgtgaaactccaccggcgaactgcctttttcaaacgagatcgtctccgcctcaatgagcgcgacatagcgcccgttcacttttgcgagatggatggattcgccgaaatcagccagtaatcctttaatctctgtttctccgactttcattttcagctcggcttccggcgtgtgttcaatgatctgcgcggatgcctcgatgacttgatgggtgtcgaggcgctcctgaatttcccgcttttcactcgcttcccaaatttcaatgtcgtgctcaaactgctgaagctcttcgctgttttcttcaaaagtttcatacacgtgctcctgcaccatgttcatgacttggtttttcatgatttccggcatcgattcgccatattcgacaaatttgagaaaatcttcgaaataacgggcgtgcgaggcctggtggattttcagctcatgctcttccgtcatgccttcttccggcatatacggatattgaatgcttttcatgttttttgtcgtgatggccatttcgacctttttaatgagagacgaggcgtctgagatgcgggcgaccttcggctcgaaatcgcatttcatcataaagacgaatttgtcctcaaaatatttgcgcggaacggccgaagccacgataaaaacaccgccgcgcacggcgctcgtgtcaagataagtacggacgaactgttcgcttgcctcgataaatgcttccttcgtatccgcaagtctggcgcggttgaaaaggttgtaattcggatttgaatcaagctcatggcccggctccgtgataaaatggccgatttttgtggggacctgctcggattgcggatgccgttcagctttccgtttgacgattttcttcaattccccgtcaagaaaatccttcagctcgctttcttcaaattcgtctgtgtcaagggtctggaaatgtttgaactgtttgtttgcctgttcgtcttttccttccacttgaatgacataaaacgataaaaacttgatttcaaaatccatatgtgaactcaccttatttctgtatttaacaagcctctccagtatagaaaaaaccgttatcaatcgtcaatccggggattgatccgtaacggcggataattggccggtgaaaagggcactgtagttggaaggaacgcatcaatgtgtaagaaagggtgttattcatgaaggaaacaggtccgattccgcagccgaagacattcggtcctctcggcaatcttcctttgcttgataaagacaagcctacaatgtcgctgatcaaactggcaaacgagcaggggcctatttttcagctgcataccccggcgggcgccattatcgtcgtgtccggacatgaactggtgaaagaggtatgtgatgaagagcggttcgataaaagcattgaaggtgctttggagaaagtccgggcgtttgccggtgacgggctgtttacaagctggacgcatgagcctaactggcgaaaggcgcataatattctgatgccgaccttcagccagcgcgcgatgaaagattatcattcgatgatgactgatatcgcggtgcagctgattcaaaaatgggctaggctgaacccggatgaggccgttgatgtgcctgctgatatgacccgcctgacgctcgatacgatcgggctttgcggctttaactatcggtttaacagctattacagggaaacgcctcatccgtttatcaacagcatggtgcgcgcccttgatgaagcgatgcaccaaatgcagcgccttgatgttcaggataagctcatgatcaggacgaagcgccaatttcatcatgacattcaggcgatgttttcgttagtagacagtattatcgcagagcgccggtcaggcggacgggatgaaaaggatctgctggccagaatgctgaatgtggaagacccggaaacgggcgaaaaacttgatgatgaaaatatccggtttcaaatcatcacgtttttaattgccggccacgaaacgaccagcggcctgctttcctttgccatctattttctgctgaaacatccccgtgttttggaaaaagcctatgaagaagccgatcgggttttgaccgatcccgttccttcttataaacaagtactggagcttagttatatccgaatgattttgcaggagtcattgcgcttatggccgaccgcgcctgcgttcagcctttatgcgaaagaggatacggtgatcggcgggaaatatccgatcacgccgaaagacagaatttccgtcttaattccccagcttcaccgtgataaagacgcgtggggagacaatgcggaggaattttatccggagcggtttgaacatcctgatctagtgcctcaccatgcgtataagcctttcggaaacgggcagagggcgtgtatcggtatgcagttcgccctgcatgaagcaactcttgttctggggatgattctgcagcattttacctttatcgatcacaccgattatgagctcgatattaaacagacactgacgattaagcccggcgactttcatatccgggtgcggccgagaaacaaaggagccgttgcggcagctctcccggcggctgaaaaagcggcggaagacgtcgaaaaagaaaaacgggaaacaaaaggcgcatccattatcgggcttgataaccgaccgcttctgattttgtacggctcagatacgggaaccgcagaaggcgtggcgcgggaacttgccgatactgccgggatgcacggcgtccggactgaaacggcgcctttaaatgaccggatcggaaaactgccgaaagaaggagctctcttgatcattacgtcctcttataacggaaagcctccgagcaacgcgggacaattcgttcaatggcttgaagaagtcaaacccggggagctggaaggtgtccgatatgccgtcttcggctgcggtgatcataactgggcggcgacatatcaggctgtgccgagactgattgatgagaagcttgccgaaaaaggggcggaacgcttttctgcccgaggcgaaggggacgtcagcggggattttgaaggaaagcttgatgaatggaaaaaaagcatgtggacggacgccatgaaggcattcggtcttaagctgaatgaaaatgccgaaaaagagcgaagtgcgctgggccttcaatttgtcagcgggcttggcgggtctccgttggcacagacgtatgaagcggtttacgcatccgttgcggaaaacagggaacttcaggcgccggaaagcggccggagcacaaggcatatcgaaatcactctgccgaaagaggctgcctatcatgaaggggatcatctcggcgtgctgccggtaaacagcaaaaagcaggtcagccgtgttctccgccggttcaatctgaacgggaatgatcaagtgctgctgacggccagcggacagagcgcggctcatctcccgctcgatcggccggtcaggctgcatgatcttctgagcagctgtgtcgaattgcaggaagcggcatcaagggctcaaatccgggaaatggccgcttatacggtctgtccgccgcacaaacgggaattggaagattttcttgaggagggcgtctatcaggagcaaatcttaacatcgcgcgtctcgatgctcgatctccttgaaaaatatgaagcgtgtgaacttccgtttgagcgatttctggagcttttgcgcccgctgaagccgcggtattattcgatttcaagttcgcctcggaaacatcccgggcaggcctcaattaccgtcggcgtcgttcgcggccccgcccggagcggtttgggtgagtatcgcggagtcgcttcgaattatttagcggaccgccgccctgaggatggtatcgtgatgtttgtccgcactccggaaacacgattccggctgccggaagatccggaaaaaccgattattatggtcggtcccggcacaggagtcgccccgttccgcggatttctgcaggctcgggcagcgttaaaaaaagaaggaaaagagctgggggaggctcatctgtatttcggatgcagaaacgatcatgattttatttaccgtgacgagcttgaagcttatgaaaaagacggaatcgtgacgcttcatacggctttctcccgcaaagaaggcgtaccgaaaacgtatgtgcagcacttaatggcgaaagacgccggcgctttaatttccatcctcggccggggagggcgcctctacgtatgcggagacggcagcaaaatggcgcccgatgtagaggcaacgctgcaaaaagcgtatcagtcggtccgcgaaacagacgaacggcaagcgcaagaatggcttttggacctccagacaaaaggcatttacgcaaaagatgtttgggcggggatttgagcgatgtgatgaaaaggactggatgactccggtcctttttttacatcacccaaaaaaaaccttcaagtttttcagtccctttgcatacaataacttcagcccgcctgttgggcggctgtctttgatattcatttttcgtttttagaagtttgtgttattcttatatttggtatctcctattttcagaccgggtctgataaggtaccttttaatgccagaaaaaaatgtgaaacgaagaacggatatcctgcgtctaatggctggcgggataagatgttcaataggcatgacacgaatgataaatatatcgttttttaaaatggtgtgtttatggggctgtgtgatgctttcgttttgctcggaaagcaggaattgaagcaaaaagtaagaatacagatttaaagtgtttaggaaagtagaggttgccatgaagaaattattttcttacagacttagtttttttgtactggctattattttgttttgggccaaaacgtatttagcctatcatgctgaattcaaccttggggtgaagggtccgacgcagcagtttctgcttgtgatcaatccgttctcaagcgccattttctttttaggactggcattgtttgcgaaaggccgcaaatcagcgattatcatggtgattattgatttcatcatgacgtttattttgtatgccaatatcctattctatcgattcttcgatgatttcttgacattcccgaacttaaagcaatccggtaatgtcggaaatatgggagacggcatcttcagcattatgtccggccatgatattttatactttgttgatattattattttaatcgcgcttctggtgtggagacgtgagctgaaggaattcaagctgaaaaaacggtatacgtcattaattatcgtgacgggtattgtgttgttcttcgtgaacctggcgattgccgaagaggaccgcccggagctgctgacaagaacgtttgaccgcaattacattgtaaaatacttaggcctttataattacacgatttatgacggcgtacagacggcgcagacggaatcacagcgggcatatgccagcagtgatgacctgacgagcgttgaaaactatacatcgtcgcattatgcgaagccgaacgccgagtatttcggcaaggccaaaggcaagaacatcattaagattcacctggagagcttccaatcatttttgatcaattacaaacttgacgggaaagaagttacgccgttcctgaataaactcgcccgcggcggagaggacatgacgtactttgataactttttccaccaaacgggccaaggtaaaacatctgacgccgagctgatgatggataacagtctgttcggactgcctgaagggtcagccttcgtgacaaaaggggaaaacacgtatcaatcgcttcctgccatccttgaccaaagtgagggctatacaagcgccgttttacacggtgactacaaatcattctggaaccgtgaccagatttacaaacatatcggctacgataaattctttgacgccagcacatacgatatgtctgatgacaaccttgtcaatatgggactgaaggataaaccgttcttcaaagaatctataccgaagcttcagtcgctgaaacagccgttctacgcgcatttgctcacgctgacgaaccattatccgtttacgcttgatgaaaaagacgcaacgatcgaaaaagcgaaaacgggcgacgcgactgtggatgactatttccagacggcgcgttatcttgacgaagcgcttgaacagttctttaaagatctgaagtcatccggtttatatgacaactcggtgattatgctttacggagaccattacggaatctctgaaaaccataaccgcgcgatgaaagaaattctcggcaaagaaattacgccttatcaaaacgcgcagaatcagcgtgtgccgcttatgcttcgcatccccggcaaaaaaggcggggtgaaccatacgtacggcggtgaaatggacgttgtgccgacgatccttcacttggaaggcatcgattctaagaaatatattaatttcggcaccgatctcttctcgaaagaccatgatgatacggtgacgttccgcaacggagattacgtcacgccgaaatatacttccatctccaatgtcgtatacgatacgaagacagggaaagaactgaaaggcaatcaggaaacgaaaaacctgaaagccagagtcacagagcagctgaagctgtctgacagcgtgatgtacaaagacctgctcagattccacaaattgagcgactttacgccggttgatccgtctaaatatcattacggcaaagaaaagctgaatcaggataataaataatagaaagagccttacggaatttccgtgaggctctttttttgtgtgtatcttcaccaatctgaaaaaagagagagcttttggtcacaaagggcgccaatctctcatatcttacagtagattttgaaaccggtggtagagaatcggacaaattatcgggttggtttctcttatacgggcggtttcgaatccaatattcacagagaagaggggtagagatgaaagcagtcattctctgcggcggaaaaggaacgagaatgagcgaaatcaccaatgaacgtcccaaaccgctcgccatgataggcggcaaaccgattctatggcatattatgaaactctatcaatactatggcgtgaacgaatttatcctgcttcttggtttcaaaggagagatgattaaggaatatttcttagattatgactggaagaatcacagcatgacgctggacagctctaccggagaagtgcggatattgggaacatccgagccgtggaaaatcacttttttagacacgggggaacacacgcagacagcggggcggcttttacaggcgaaggacatcatcggtgatgaaacctttcttatgacgtacggggacggactggcgaacatcaacctgtttcatctgatcagctatcatcaatcaaaaggggctgcggcaaccgtcaccggtatagaaaagacctcgcaattcggaacgctgacggttgaagacggtatggcgaaaagcttttctgaaaaaaactcaagtgacggcatcatcaacggcggatttttcgtgctcagcccgaaggtatttgattatctgccgaaagacagggacgtcatgtttgaagaagaaccgctgaaggagctggcaaaggacggcgaattggcggtataccggcattacggtttctggacggcgatcgatacgtataaaaatctgctggaaattaacaagatgtgggaccggggacaacatgtatggaaggtatggtgatcaagtttgagtttctggaaaaataaaaatgtgtttgtgacgggatgtacaggtcttttaggaagctgcttggtgaaggaactgatcgatcagggggctaatgtgacgggacttgtccgtgacactgtgcccaagtcgaacctgtatcagggagaacaagtgaagcaaatgaatatcgtgcagggcgcgcttgaagatctggatgtgattgagcgggcgctgggcgagtatgaaattgacacggtctttcatttagccgctcaggcaatcgtcggcgtcgcaaaccgcaatccgatttccacatttgaagccaatattctcggcacatggaacatccttgaagcgtgccgcaggcatccgctcatcaagcgggtgatcgtcgcgtccagtgataaagcgtacggcgaccagccgacactgccgtacgatgaaaacatgcctcttcagggcaaacatccgtatgacgtatcaaaaagctgtgccgatttattaagccacacatattttaatacgtacggacttccggtctgtattacgcgctgcggcaacttgtacggcggcggagatttgaacttcaaccggattattccgcagacgattcagctcgtgctgaacggtgaagcgccggaaatccgcagcgacggcacatttatccgtgattatttttacatcgaggatgcggtcgaggcataccttttgctggcggaaaagatggaggagctcaatcttgcgggagaagcgttcaacttcagcaatgagattcagctgacggtgctggaacttgtagaaaaattcttaaggcgatggacagtgacctcaagccgaaagtgcttaaccagggaagccacgaaatcaagcaccaatatttatcagcggaaaaggcgaggaagcttctgaattggacgcccgcgcataccattgatgaaggattagaaaaaacgatcgaatggtataaagccttttttcaaaagtaacagaaacagaggtgagagaaagacgtgacaagcgcatattgcacagttttatcaaaaggaaggctgtatcaggctatcgctttgttcggctcattgaaagcggttcaggcggacgcccccatttttactttgtgtatggatcaagacacctatgacgtgcttcaggcaatgcgtccggataatgtcaccttgattcaggtgtccgcactggaaaatgaggagctccttgaactgaagcggacgagggatcagagcgaatactgctggacggtgaagccggtatttctcgaattcgtgctggacggacatccggaattagagcgtgtcacgtacattgatgccgatttgtttttcttcgctgatccgcgcgcgatttttgacaatcagccggattgttcggtgcttctgtcacggggcgatatcgtcattccctcatttgaaaaacaggaaatcgacatgctgcagcgtcttttaggccggtataattccggttttctcagcttcaaaaccgacagtgccggcacagattgtctcagatggtggaaagaacgctgccttgaagaatgcaaaaatgcgccgggcgaaggaaaattcggagatcaaggctacttggattacatgtccggtctgttcccgaacgtgtgtgacatcaccacgcccggcgtgaatatcggccattggaattacggccgccacacgttttcatggaaggacgggcgtcttgtgctcgaagacggaaatccgctgattttctatcatttcagcggataccggatcgtcacagccggcgacattcggcagattcatgagacggaccggaccgacctgccgtttgtccatcagctttatcaggacattctgaagcgggtgatcgggacggtcagcgccgtctgccccgagttcagcggctttgcatctgaggatgataacaaataaatgatcatatacaggaagtgaacgaaaagtgaaggcaagcgtcattgttcccgcatataattccaaggagaggctttataacagcctgctgtccctgaatgaacaggaatgcacagagccgttcgaagtgattgtggctgacaacggttcggaagacggaaccttatccatgcttgaatcattcagcgcgaattttccgctgatttttgtgagaattaaagaaaacagagggatcgcttacggccggaatcaggcggtccgcaatgccagaggcgatattttgattttccatgacagcgacatgcttgccgaaaaggatttggtggcgaagcatatcaaggctcatgagaaccgggacgatcttgtcgtatgcggtatgttctggaagcggatttacagcttttattatgaccgttttgaaaaagagcataaggaaaaactcgccgaactgtatgaagagctgccgggcgataaagagccgctccttgatgaaagtgacatcagagacggaagctttcttgaacgatgctttgatttagataccgactttatccgggtgctgaaaagcattttggaaaaatacggagatgatttgaacggctaccgtctgccatggcgttttttcattacgaacaattcatcagttaagaggcagcacgtggcagatctcggcctgtttgatgaaggcattgtcagatacggctttgaagattatgatctcggcatcaggcttcatcagtcgggaatgagatttcagctgcggcgcgatatcatgagcgtccatcaggagcatccgagcaactgcgcttccgttgatgacatcagggcgaatatcgcgtacatgtgcgacaagtacaatgacattcattcgcttgacgtgcacctcgcgtttaacggcccgtttgacgcggagttaaccaacagcataatggcagacatcgaagtgctgcttgattatgagaaatatgaaagcctgctgcacatttttctcgaactgctgcacgcggttaaagaccgcaacctcgatccggactggaagacgaaaagcccgcggatcacggcgaacagcttccagctgccggaggtcggaaagcttttggcaaaagcggaaaaaaagctgggcgtcacgcactttgcaagggcgttcaaagcgctgactgctgatttactgcatgtggatcttaaataaattggatgtgatatggtgagtaaatatcatttttcaaccattgtttccagaacgcatatctttaaactgatgccgatgattcattctctccatgagcattgccgggattttcatctgtatgtgctgtgtgtcgatcagaaagcgtacgaactgcttcagcaggtgccgtgggaacatgtcacagcggttcagctccatgaaatggaggacccggagctgcttgaagcaaagggcggccggacgtttcatgaatattgctggacgctgaagccggcttttctgttccatgtgatgacggagtatgatgaagccgaatattttgcccatttggacaccgatctctttttcttctcagatgcgggcgagctgtttgcggaaaagccggatgcttccctttttctgacggatcaccgcaattcagaacggtttgcgtcttattacaagctgacggggcagtacaacaccgggtttgtcggcgcgcggaataccggggaagcgtatcgggcggtctggcagtggagacaggattgcatctcctattgtacggtggagatgaatgaagaaaaaaagacatacggtgaccaaaggtatgttgaaaagtggcccgcgcagtttgaacacgtgcatgtcacggagtcgatcggcgcgaatgcggcgctgtggaatattgagcaatatgacgtcagcctgcgcgacggggctgtatatgtcaatgacaccccgctgattttttatcatttttcaggctttacgctcgtcacggagaacgaattcaatctctgctggtactatcacattgatgatgaggcgacagtcagtatgatttacgtcccgtacatcaaaaacgtaaaaaaatggattgatgaaattcaaaaagcgtttcctgatttcagagacgggtttattccgaaatatgcggttcctgacactcatttttatacggttgaaacataaaatccctgccttttcggcagggatttttttatgaatgccattcttttaatgttttgtcgctcggcaggacaaaggcgagcagacctaaaacgggcagaaaggcgacggctgtcatggtcggcgtcaatcccgctgaatcaataagagctccgagcgcaaccgctccgatcgcgcccattccgaaggcgagcccgaccgtaagccctgacatcgttccgattttgccgggaacaagctcctgcgcgtagacaaccgtcacggagaagctggacatcagaacaacgccgatcagcgccagtacgccataggcgatgacaggtcccgcaaacggaaggaaaatcgtcaagggagccgatgccgtcatggaaacgatgatgacgttccgctttccgaaacggtctgcaagcggcccgccgagaaacgttccgacagctccgaaaaataaaaagacgaagatgtagctctgtgcctgctgaatgctgacatgataggcattcatcgcatagaacgtatagaagttgccgatcgcgctcacataccaggagcgcgcgaaaattaagaagataatcatgataagtgcaagaataatcggttttgtaatcacggtctgcacagcggcggccggtgattttttacttgcggcgcgcaaatgaataaggcggcctttataccatttggcgatataaatgagaaacagcacagcgattgcggcgactagcgtaaaccagacagagccgaattgaccgagcggaacgagaatcagcgcggtaatcaagggcgccatcgcctggccggtattccctccgacttggtaaatcgattgcgccaatccgcgcttttcgccggcggccatgtaagcgacacgcgatccttcaggatgaaagacggcggagccaaggccgataaaaaagacacagcataaaatcgtcagaaaagacggggcgaacgcgagacctaaaatgccgagcatgcttgcggtgagtccgagcggcaaagcatacggcatcgggcgtttatccgtataccagccgatgacgggctgcatcacggaagacaccatattcagcgtaaaggcgataattccgagctgcgtaaatgtaagattcatggaacgttccaaaatcggaaacatcgccggaatcaccgcttgcagtgaatcgttcagcagatgacagatcccgataatgaacaaaatagaatacatggttgtctcgggacgatggacaggtttttctttaagcggggcggcaattgccaaagtgattctcctcctttttatgtaaacgaagcatacaccatattattcataaggtgaatgaattatcaagggcaaaaaaggctcttctttctcaaacagaaaaaagagcctccctttttatttatttaacaaactgtgttttctcgaatacatcatatataccacgatcccggcggcgatccagatgacaaaggcgagccatgtcacgcccggcaggctgcttgcgagatacaggcataagcatgcgctgatgatcggcacaaaaggcacgaaaggaacacggaaggaagatttgatctccggatgtttctttcttaaaacgatgacggcgatcgcaatgactgtaaaggccgccaaggttcccatattgacgagatgcgccaaggttcccagatcaataaaacctgcgatcccggcggcagcgatccccgtcacccatgtgttttgaaacggtgttttaaaacgcgggtgaaccttggaaaacatgcggggcaaaaggccgtctctgctcatcgcaaatgttaggcgcacctgagcgtaaagcagagcgagcatgaccgttgtaatcccgataatcgcgccgacggaaataatgcctgctattttgttctggccgacaaattggagcgcgaaagataccggatctccgacattcagcttggtgtacgaaagcattcctgtcaggacgagcgataccgtaatgtaaagaacggtgcagatggcaagcgcgccgatgattccgacaggcattgatttctgcgggtttttcacttcttccgacgcgtttgacacggcatcaaatccgagatacgcgaagaaaacggtcgcggcgctcgtgatgacgcctttcattccgaacggcataaacggcgaccagttttccggtttcacgtagccgaaaccgacgacgataaacagcagaatgatcgcaattttcatcaatacaatgacattgttaaagcgggtgctttctttcacgccccttgaaacaatcgcggtaatgaccaaaataatgataacggccggcaggttgaacacggcacccgttttgctgccgggtgcggcggtcagcgcctccggaagatgcagcccgaatcctgcaagaagcgactggaaataggatgaccagccggttgcgacggcggcgagcgcgataacatattcaagcattaagtcccatccgattaaaaacgcgagacactccccgagagtaacatatgaatacgtatatacgctgcctgaaatcggaatggatgaagaaaattccgcataacaaaacgcggcgagcgcgcaggcaaggcccgcgagcacaaacgacagaatcaaagccggtcctgcgcctgtcgcggccacagtcccggtaatcacaaaaatccccgtgccgacaacacagccgattccgagcaaaaccaagtcaaaagcgcttaacgagcgggacaggctggtctgtttgctctgggcctttaagtcggccagcggctttttccgaaatagtaaagacatatgggtcctcctgaaaattcataatattcttatcattatatacactgacgtttgtattatattgtcgaaatttctcgcagtcaattaaagaattttccactttaaaaggacaaagctaaaaagcgtcgatgcacggaaggaaagggaattttattgtgaaatagttcaattttctcaccttaagaccgatacaaaagatgactcatcaactaatttcaagtttcggtgaaagggagatgtttacatgtttcaatatgaagaactaaataagcagtttatcggcggccgatggagggatgggagcagccggaacgtattggaaaacagaaatccttatactcaaaaagtcatcacctcattccgaaaagcgacgcctgatgacgtggatgcggcatatcgcgccgcggctcttgcgaaacaagaatgggacaaagtaaacccttttaaaaagcgggccattttggaaaaagccgtttctttcattgaagagcacgaagaagcgattatttacttaatcatggaggagcttggcggaacacggctgaaggctgagtttgaaatcggacttgtcaaaaatatgataaaagaagccgcaacatttccggtgcggatggaagggaaaattctcccgtccacgattgacggaaaagaaaacaggctgtacagaatacctgccggagtcgcaggggtgatcagcccgtttaatttcccgtttttcctttcgatgaaatctgttgcgccggcactcggcgcggggaacggcgtcgtgctgaagcctcatgaagaaacgccgatctgcggcggaacgcttatcgcgaaaatttttgaagcggccggcgtaccggacgggctgctgaatgtcatcgtgacggatatcggggagatcggcgacagctttgttgagcatcccgtgccgcggataatctcatttacaggctcaaccggagtgggcagctatatcggacagcttgcggtcaaacactttaaaaaaccgctgttggagcttggcggaaacagcgcgctgatcgtgcttgaggatgctgatcttgaatacgccgtcaatgcggccgtattcagccggtttacgcatcaaggccagatctgtatgtcggcgaaccgcgtgctcgttcacacatctgtttatgacaaatttacagagctctacgaagcgaaagtgtcatcgctgaaagtcggcgatccgatggaccctgatacggttatcggtcctttaatcaatgagagacaggcggaaggcctgagacggtctgtcgaaaaagcgatagaagagggagcggttccggtgctgtccggccgattcagcggaacggtcgctgagcctgtcattttaaaagatgtgaaacctgagatgagcatcgcgaaggaggagctgttcggaccggccgtctgcatcatgccgtttgaaacggaggatgaagcggtaagcatcgcaaacgcgacaccgttcggtttaagcggagccgtgcatacggcaaacgtggagcggggcgttgagtttgctaagcggatcgaaaccggcatgattcacgtcaacgatacgaccattaatgatgaaccgaacgttgcgttcggcggcgagaaacaatcaggtctcggcaggctgaacggcgaatggagccttgaagaattcaccacgctgaaatggatttcggttcagcatgaaaaacgccaattcccatattaagaaggagtgaaagaaatgagtatacagacggagcagcaaacgcacagcctgcttgacgcttttgtcaaagttgcgccttttttaaacagcctgatccaagatgacatcaccatcggaatttatgatacagaaaaattaatcgtgaatattccggctaaaacgttttctcttaatgtaaagccgggagatccgctgcaaaaaggggacatcattacagacgcgatccgcatgaatcagaagaagacaagcatggtgccgaaagagctgttcggatttccgctgatcgccagagcgattccgcttcacgatgaaaacggaaaagtcatcggcggcgtcggtctcggcacgagccttgaaaaatcagccaagcttcatgatgtcgctgaaagcctgtccgccgtcgtggaacagaccgcttcggcgatcgcggatatctcagaatccatcagcggtttctcagcacagatgaccgggatttccgctcaggcgaaacaagtcagtgaaagcgcgggagaaatcgccgacatttccgttactgtcaagggcatctcggatcaaagcaatctgctcggtttgaatgcggccattgaagccgcgagagcaggagaatccggcaagggcttttccgtggtggcggatgagatccgcaagcttgccactcattcaaaagacaatgtcggccaaattgaccagattacgaaaaaaattcacagcctgctgaaagggctggaggactcaattgaatccatcaaccagaacacggacggtcaagcggcggcggtagaacaaatttctgccacgatgcaggagatttcgggaagcgcccagcatttagcgaaaatggctgaaaacgtgctcggagaatcataaaaaagggagcttacgggctccttttttgttttcccttatcaatcggaaactgcacttacacgtttgatccgtcatgctcaggggtacacatacgaatacatcaccaatgataaaggagagtcttgtatgtctgatgcaaatctgcacaacccgctgacgaaatatgatcatgatgaatttccaaaacaatatcaagaaccgcccggtttgcagaaagagatgaagcctgtgccggactgcggtgaaacaagctataaaggagccggcaagctgaagggaagaaaagccctcgtcaccggcggcgattcaggtatcggccgggccgccgcgattgcttatgcccgggaaggggcggatgtggccattaactatctgcctgaggaacagccggatgccgaagaagtgaaagcgttaattgaaaaagagggaagaaaagctgttctgctgccgggagatttaagcgatgaagcgttttgcggagaattggcggaaaaagcgtatcaagagcttggcggtcttgacacgctcgctcttgtcgccggcaaacagcaggcagtggatgatatcagcgatcttactacagaacaaatctatcaaacatttgaagtcaacgtattctcgctgtattggctcgtcaaagccgcgcttccgtatctgccggaaggcgcgtctattatcacgacaacgtccgtagaaggttataatccaagcccgatgctgttggattatgctgcgacgaaacatgccattatcggttttaccgtcggcctaggaaagcagctggcgaataaaggaatcagagtcaactcggtagcgccggggccgatctggacaccgctgcagatttcgggaggacagcccggagaaaacattccgaaattcggcaaggaaacaccggccgttccattaaagcgtgccggacagccggcggagctggcaggaatttatgtctttttggcctcagaagaatcaagctatgtgacatcccaaatttacagtgtaagcggaggaattccgacagcgtaatcaaaaaggagctgcccttcatacggggcagctcttttttttgatgttatgtgccgagcacgttttgattatacaggacactcggatgtgacggatgataggaggcggctttgtcgttatgaatcttcgctttttctctgtcgccgagctgccagtggcagacgcagagctgcagatgggggtaccaggtggaatattcgagctgggtaaagcctgcatcactgcttttggcggatagggcgagctcataccaaaacacgccctgccggtattgccgtttctccgcaaaatagtcgccgagcctgcagcagaactccggccgcggacaatcgatcagaaatgattttaagagagacgtcatggcggcctcttcatggccgaccgccctgtagcaatcggatagatattggcacgttctgatctcgtcttcgatccagcactgttttgtggaaagaaaatggtgataatacgtgatggcgcgctgatactggccgtgatcctttaattcattcgcgaagtaaaacaaatcgcgcggtgtcatcgattcactgttttccgccattctctcataaatcttcaagttgcggtccgagggaggcgagtgctttttttcggatttccggtgtgtgacggcaatatcggtttctatgatgtttccgtatacctcaagatactcatgcacggctccgatccagcggaaccctttttcacgcttgacgagtcggttgcggcggtatctgaagctgacctctccccgatcatcaaagccgacgtgataatacatggataccgcgtccacctcttttgaaagcgacgccttcagttcaatcagcttttcacggtcctttaccgtcagcatatcgtcggcgtccagccacagaatataatccatttccgctttcgaaaacacaaaattacgggcggcggcaaagtgatcgatccattcaaaatcataaatcttatccgtataacgggccgcgatttctttcgtccggtcggtcgagcccgtatcagcaatcacaatttcatccgcaatgtctttgacggaatcaagacagcccgcaagcacttcctcttcatttttcacgataacgcacaaactgacgctgatcatgtcatcacctcttcccctccagtgtataaaaggagaggcggaaacattcttcggacaaaatgatctcttccaagaaatttgtctgtccttttactagttttattacagcgcctgatttaaaatgaacacatgaacttacgtgaggattgataggaaccatgagcatcataaaagcggaaaacctttataaaacatacggagataagacattattcgaccatatctcctttcatattgaagagaatgaaagaatcggtttaatcggcccgaacggaacggggaagtctacgcttctgaaaaccattgccggccttgaatcaacggaggaaggcgagattacggcttcaggaaacgtgcatattgagttcttgcatcaggaccctgagcttccggccggacaaaccgttcttgaacatatttattccggcggatcagccgtcatgagaacgatgagagagtacgaaaaagcgcttcaggcgctgaatgaagaaccggaaaatgaccagcgtcagaaacacctgcttgatgcgcaggcccgaatggacgcgaatgatgcgtgggaggcgaatacgttagccaaaacggttttaaccaaacttggcgtcaccgatctgatgaaggatgtcagcgagctgtccggcggccagagaaagcgcgtcgcgattgcgaaaaacgtcatccagccggctgacctgctcattttggatgaaccgacaaaccacttggacaatgaaacgattgaatggctggaaggctacttatcgcaatatccgggcgccgttatgcttgtcacgcacgacagatattttctgaacagggtgacgaacagaatttacgagcttgagagaggcagcctttatacgtataaaggaaactatgaagtattcctggaaaaacgggccgaacgggaggcgctggcagagcagaaagaaacaaaacgccaaaacctcctgcgccgcgaattggcgtggctcagaagaggagcgaaagcgcgctcgacgaaacaaaaagcgagagtggacagagcggaggcgctcaaggagcaaaaagggccggcagtctccggatcactcgatttcgcgatcggttcccaccgtctcggaaaacaagtaatcgaagccgataacgtctccattacctataacggccaagcgctgatcagccagtttaatgagcttgtcatccctggggaacgaatcggcatcatcgggccgaacggaatcgggaaaacgacacttttaaacagcctcgccggcagaattcagcctgacagcggcaatatcaccatcgggcagacggtccggatcggctactacacccaggatcacagcgaaatgaacggcgatatgaaagtcattgaatatataaaagagacggccgaaatcgtcaaaacggcggaaggcgatgtcatcaccgcggaacaaatgcttgagcgttttctgttcccgcgtccgatgcagcagacatatatcagaaagctgtcaggcggggaaaaacgccgtctgtacttgctgaatgtactgatgcaggagccgaatgtgctgtttttagatgaaccgaccaatgatctggacacagaaacattaagcgtgctcgaggattatatcgaacagttcccgggcgtcgtcatcaccgtatcccatgaccgctatttccttgaccgcgtcgtggaccgcctgatcgtatttgaaggacacggtgtcatttcccgtttccaaggttcatacagtgaatacatggaacaagcaaaagagaagaagacggcggtaaaacagccggccgaagagaaaaaggcggaagaagagccgaagaaaaagcgcaaaaagctttcgtacaaggatcagatcgaatgggacggcatcgaagacaaaatcgccggccttgaagaaaagcatcagcgtctggaagcggaaatcgctgaagcgggaagtgatttcggaaagatacaagaactgatggccgaacaggcaaaaacggctgaagagcttgaagcggcgatggaacgctggaccgaattgtcactgatgattgaagaacttgagaattaagaaaagccggtacggcccccgagaagatggcgggtcataccggctttttttatcttacacagatgtctcccggcgctttaaagacaaaggttccgtccaagccaagtttatccggcataaaaagtttacgtttacgttaaggttcaaatggtgtataatagaaacagatacgacaagagggggattcaccttggaatggatgaagattgatcaagttgccaagcgaagcggattgacaaaacgaaccattcgtttttacgaggagattggtttgattcctgctcctaaacggacagaaggcggcgtccggctttactctgaagatgatatggaggagctcgaaaaagtcaccagcacaaaagaagtgctcggtttttcccttcaggaacttcagcagtttatggagatgagccgtcagctggaattaaacaaagaggggtacttgttgtcactggatccgaaggaacggaaagaaaagctggaagagattcagcacgctttgaaccaccagcttgagatgattgatgagaagatcagcacatttcagcattttaaaacgcgccttaacggaatgaaagaaaaagctgaccgcgccattcaatcaatcgaatgattttgctgtaaacgctatggatatagcgtttcttttaatggataaaacaggaggtctggtcaaatggatacatcatcacaacagaaaacaggcttattcagccagccgaaagccgtttgggcggttgcgtttgcctgtgtgatttcctttatgggaatcggtcttgtcgatccaattcttccggcaatcgccgcacaattacatgcttcacctagtgaagtatctctgttatttacaagttatttgctcgttaccggttttatgatgtttttctccggcgcgatttcaagccggatcggcgcaaaatggacgctgcttctcggacttatttttatcatcgtgtttgccgctctcggcggaagctcaagttcaatcgctcagcttgtcggctatcgcggcggctggggacttgggaatgctctctttatttcaaccgcgcttgccgtcatcgtcggtgtatctgtcggcggcagcgccaaagctattattctgtatgaggccgcgctcggactgggaatttctgtcgggccgcttgccggcggagagctaggcagcctttcatggcgcgctccgttcttcggagtgtctgtcctgatgtttatagcgctttgcgcgatttcactcatgctgccgaagctgccgaaaccggcgaaacgcgtcggtgtgtttgatgcgatgaaggcgctcaaatataaaggccttttgacaatggcagtatctgcattcttatacaactttggattttttattttgcttgcttattctccgttcgttctggatttagatgaacacggtctcggatacgtcttcttcggctggggccttctgctggcaattacgtcagtctttacggcgccgctcgtgcataaagcgctgggcacagtgcgttcgctcgtcgttctctttatcgcctttgcggccattctcgttattatgggggtctggactgaccatcagacgttgatcattacatgtatcgttgttgccggtgctgtcctcggtatggtgaatacgatcatgacaaccgctgtgatgggtgctgcgccggttgaacgttccatcgcgtcttcagcctacagctcagtccgctttatcggcggtgcgctcgctccgtggattgcgggaatgctgtcagaacacttcaccgcaagcacaccatatacagtaggcgggattgtcgtttttgtcggcatgcttgttcttcttatgggacgcaaacatcttgccggaataaaagccggacattaaaaaaaggaacttccgcacgggcgggagttcctttttgtgtttacagcactttcgtcgtccaagattcacaattccatgtttccgtcgcgatatccatgtagaactcgggttcgtgggaaatcagcagaatggagcctttgtattctttcagcgcgcgtttcagctcttctttcgcatcgacatccaggtggtttgtcggttcgtcaagcacgagcaggtttgtttctgaattgatcagcttgcacagtctgaccttcgctttttctcctccgctgagaacggagacgcggctttcaatgtgtttggtcgtcaggccgcatttggcgagggcggcgcggatttcgtattgggtaaaggaaggaaattcgctccacacttcttcgatgcacgtattgttattggtttctttcacttcctgctcgaaatagcccgtgtattgatgctcgccgcgctccaccgtgccttccagcggctggatttcaccgagcaggctttttaacagcgtcgttttcccgatgccgtttgcgccgtacagggcgactttctgtccgcgctccattctgagattgagcgggcgtgacagcggagtatcgtaaccgatgactaagtccttcgtttcaaaaatgagcttgcctgacgttctcgcaggcttgaaatggaattccggtttcggtttttcggccgccagttcgatcatatccatcttatcaagctttttctgacgggacatcgccatatttctcgtgctgacgcgggctttgttgcgggcgacgaaatctttcagctcagccacttcctgctgctgttttttgtaggcggcttcgagctgctgttttttcacttcgtagacttccataaactgatgataatcaccgacataacgcgtcagctcttggttttccacatgataaatcaaattgattacgctgtttaaaaacggaatgtcgtgagaaattaagatgaacgcattttcatattcctgcaaatagcgtttcagccattcaatatgctgttcatcaaggtagttcgtcggttcgtccaacagaagaatttccggcttttccaaaagcagtttggcgagcagcactttcgtccgctgtccgccgcttaagtcagtgacgtcgcggtctaggccgacttcctgcaggccgaggccgcgggcgatttcttcaactttgctgtcaatcacgtagaaatcattgtttgtcagggcgtcctgaatgacaccgacatcttcaagcagctgctcaagctcatcagggtccgcttcgcccattttgttgtaaatctcgttcatttcttcttccatcgcaaataagtaatggaacgcatccttcagcacgtcgcggatcgtttttcctttttcaagcacggtatgctgatcgagatagccgacacgcacgtttttcgcccattcaaccttaccctcatcaggctcaagctttccggtaataatattcataaacgttgatttaccttcgccgtttgctccgattaagccgacgtgttccccttttaaaagacggaacgatacattgttaaaaagcgcacggtcaccgaagccgtggcttaaatcttttacggataaaatactcatcattacacctctatcgttatcagacacgctttttttatcatgtgtctttctcatttatgattataaaggaggagaccgtttgttaaaaggcttggaaggaaaaagaaaattgcgtttgccgcgtgcatttgagatactatggagtagattttaagaattgaggagaacgacatgacccaaacatggccatttttacagcatacacaaccatttatcgccgaaaactgggaggcgtcaggctttcaggagccgaccgttattcaggaaaaagccgctcaggtgatcatggaagggaaagacgtcattgccgaatccccgacgggaacgggaaaaacattggcgtacacgcttccggttctggagcggatcaacccggaacagaaacatccgcaagtgatcattttagcgccgtcccgcgagcttgtgatgcagatttttcaagtgattcaggagtggaaaaaaggctccgatcttcgcgctttgtctttgatcggcggggcaaacgtgaaaaagcaggtggagaagctcaaaaataaaccgcatatcattgcaggcacaccgggcagggtgctcgaattgattcaggcgaaaaagctgaaaatgcatgaagtcaagacgatcgttcttgatgaagcggatcagctcgtgacaaaggaacaccgcgaaacgatgaaaaaaatcattaaaacgacgctgaaagaccgacagcttttaagcttttccgctacgctgcagccggagacagaagaggtgctgaatgccatcgcacatgaaccggccgttttgaaagtggcgcggaatacggcggaaaaagcgcgcgtcacgcatcaatatctcgtctgcgatcagcgggataaagtgaagctattgcaaaagctgtcacggctgaacggcatgcaggcgctcgtgtttgtcagagatatcggaaatttaagcgtctatgcggaaaaactcgcctatcatcacgtggatctcggcatcctgcacggagaagcgaaaaaaatggagcgggcaaagatattatcagcgtttgaagggggagaatttccgctgcttctggcgactgacatagcggcgcgcggacttgatatcgatgatcttccgtacgtcattcacgcagacatcccgaatgaagacggatatatccacagatccggccggacggggcgggccggtaaagaaggaaccgtactcagccttgtcacgccgatggaagaatccaaattgaaaaaaatggccaaatcactcggaattgagctgaaagaggccgtttattcaggcggaaaattatctgagaaataagaaacggagggcgggaagcccttcttttttattgtgaaataatagaaaaggttcaggcgggggcgggaagatggtttcaatagaccgatttcaaatattgaaggtacgtgagctgaaaatacttgaacactggtttaagaacgataatatcagacggagaatggatgcgatgcggccactaaatgcatggtatgcacgattgagtaaagatgaagacgatactgtcattatggcatatgacgggcagcttccggcaggaatggtctctatagagtttgtggaggaacgggcgtatatcggattgatcgtcaatcctttgtaccagcttcaagggtacggaaaacagatcttgcaaaaactgctgactgatcctgggtttaccggcgtgcgggaatgggcggcaagcatctaaaaagacaatcaaatcagtttagtctgctttcaagcagcgggattcactttggaaaatacggagcctgatgaagacggctttcttactttgattcttcgcggctgatgcgaaaaagcagaaaaggaggggacaaagccctccttttttcatcatcatgttaacctagatcactgactttgatgatctgtttgcctttgttttctcctttaaacaaaccgaggaacgcgtcaggaatatggctgaatccttccgtaatcgtttcttcataatgaagcttcccgtccttgagccattcggccaattgtttcgcgccttcggaaaagcggtcagcataatcactgacgatgaacccctgcatcagcgcttttgttttgatcagcttcggctggacgcgggggcccatgtcttcctcttcactttcggtattatatgaagagatcgctccgcataccggaatgcgggcgaattcattcagcaggtttatcaccgcatctgaaatcggtccgccgacattgtcaaaatagacatcgacgccgtcagggcatgcctgttcaagcgctttttgaatatcatccgccgttttgtaattaatggcttcatcaaattgaagctcctctttaagatacgcgattttttcgtcagaaccggcgatgccgacaacccgcgcgcctttgattttggcaatctgcccgaccgttgagccgacggcgcctgcagcccctgaaacgacgacggtttcgccttttttcggacgcccgatatcaagcaggccgaagtaagcggtcagtccggtcatccctaaaatgccgagatacgcctgggcgggtgcgatatccgtatccaacttgcggagggcggactcattgacggctgaatattcctgccatgcgagatttccgatcacaacatctccttttttcagcttatcgccgtctgtcagaacttcggcaatcactccgcctgttatggcttcatctaaagcgaacggctctacatatgattttgtatcctgcatccgtccgcgcatgtacggatcaacggacacataactcgttttcacaagcacttcgccgtctttcggttcgggaacggcaatcgtttcaaagcggaaatcgtcatggacgggaacgcctttcgggcgtcttgccaattgaatctgctgctgattattcggcatactgaatcctccttcaagataagtggttgttccaaatgtaacacgaaccatttcccgaatacaaaatcaaaccgtccgccggcaacaaaaaaagaagggccagggcccttcttttcttatatgcgtatttaaaagaataaccggtacacatcggtgtttttctcatgttccaaatattcataggcattcgtttttgaagaatgaagcatgtcagaggtaatcacgggctgaagcgcggtcagataagaacccagcttattttcaatttctgtcggcagaacggattcgatatcaccgatattgataatgatagagaaaacgaaatcgatattaatatgaaaagtatcttcagcaaaggccgtaagctcttttattccatccgggcagcgggtatgccggcggaatacctgcttcactaaatcactgacaacccaagcgttaaatcgctgttccggtgaaaagtaatgaataggaaccacctccctgcttaatcggctcatgaagatttttatttttctgataaaagttactttccctactgtaacatgtcccgccggaaaatatccaccgacaatctgcccgttttttcccggaactctctttcttttgtttgacctttggttgagcgggtaaacatccaatatacaaaaacaaaagggaggacttatcaatgaaaccggtagtaagagaatatacaaatgatcaaaaactgatgcaggacgtaaaagagcttcagcaattgggtgtcgcaaaagaagacgtatatgtgctttcacatgatgacgacagaacggaccgtctggcggataatactgatgtcaataccatcggagcgaaagaaacgggcattaaacacgcggtcggcaatatgtttaataaaaaaggcgacgagctccgcaacaaaattcacgaaatcggcttttcagaagaggaagcatcacaatttgaaaagcgcttagatgaaggaaaagttcttctgtttgtcacggataacgaaaaagtaaaatcatgggcgtaagctgaacagatcccaaggggttttcggtcccttgggatttttttgcggtttccgcaataaaaccgaaaggcacatgctgtacattttcggtgccgtttctcaactgatttgatacaatccaattgtaataaattggaacagagaatcaggaggagcacaattcatgaaaaaaatgttacttatgctggcggtttgtttatgtatgatccctgcggacgtctatgccgctgacctgggacggcagacgttaggaacaaatgacggctggggagccgcttccggcgggacaaccggcggcgcgaaagcctctttatcgaatgtctacaccgtatcaaacagacagcagctcgtttctgcattagggggaagcgccaacagcacgccgaagattatttacatacaaggcacaatcaatatgaatacggacgaccggaataaaacgctcggctttaatgattataaagatccggcatatgatctcaacgcttatctgaaggcgtacgacccggacaaatgggggaaaaaagcgccgtcaggcacccaggaagacgccagacagcgatctcaaaaaaaccagaaagcacgggtcgtgattgacattccttcaaatacgacgatcatcggttcgggttcaaatgccaaagtgacaggcggaagttttaatataaagaacggcgtcgacaatgtcatcatccgcaacattgaatttcaagacgcttacgactattttccgcaatgggacccgacggacggcagcagcggcaactggaactcggaatatgacaatatcaccattaacggcgcgacgcatatctggatcgatcattgcacctttaatgacggatcgaatcccgacagcggttttccctactattacgggagaaaatatcagcaccatgacggccagacggatatagccaacggggcgaattatattacattgtcctataataaatatcatgaccatgacaaaggctccgtcatcggaaacagcgacagcaagacgtcggatgaaggaaaactgaaggtgaccattcaccataactattaccagaacatcgtccagcgcgcaccgcgggtccggtacgggcaggttcatatttataataatttttacgcaggctctaaaagcgccgcatacccgttcagctatgcgtggggcgcaggccacgcgtcaaaaatatatgcccagaataatgtctttgaagtgccgggactggctgctgataaagtcatcagcgtcttcagcggcggaaaagcacttcatgaagacggcactcttttaaacggcgccgcaattaacgcgtcagctgccaacggattaagtcagtccgtcggctggacaccgtcattgcacggttccatcggctcatcatcaaatgtaaaatcagatgttatatctaaagccgggtcgggtatattaaaataataaacaagaagcacaaaggaaaatattcctttgtgttttttaattaacaaaaacgtttattaacttagttaagtagtaaaatgggatagggggatggaagacaacaaaataggaggagacctgtaatggcttcagaaaaagacgcaaaaaaacagcaggcagtaaaaatcattcctttgcttattactgttgctgtgggattaatcatttggtttattcccgcgccgtccggacttgaacctaaagcatggcatttgttcgctatttttgtcgcaacaattatcggctttatctccaagcccttgccaatgggcgcaattgcaatttttgcattggcagtcaccgcgttaacgggaacgctatctattgaaaatacgttaagcggatttggaaacaagacaatctggctgattgtcatcgccttttttatttcccggggatttatcaaaaccgggcttggcgccaggatttcttacgtattcgtacaacggttcgggaagaaaacactcggcctttcttattcactgctgttcagtgatttaattttatcacctgccattccgagcaacacggcacgggcgggcggcattatttttcctattatcagatcattatccgaaactttcggatcaacgccggcagacggaacagagcggaaaatcggcgctttcttattaaaaaccggttttcaaggaaacttgattacgtctgcgatgtttttgacggcaatggcggcgaatccgctgatcgccaagctggcccacgatgtcgcaggggtggacatcacatggacaagctgggcaatcgcggccattgtaccgggattggcgagcttaatcattacgccgctcgtcatttataagctgtatccgccggaaattaaagaaacaccggacgcggctaaaatcgcaacggaaaaattgaaagaaatgggtccgtttaaaaaatccgaactctccatggttatcgtctttttattggtgcttgcgctgtggattttcggaggaagcttaaatatcgacgcaacgacgacggccctgatcggattatccgttttgcttttgtcacaggtattaacatgggaggacatcaaaaaagaacaaggtgcatgggatacgctgacttggttcgcggcgcttgtgatgctggcgaatttcctgaatgagctcggcatggtgtcttggttcagcaatatgatgaaatcatctgtttccggtttttcatggattgtggcatttatgattctgattgtcgtgtattattacacgcattacttctttgcgagcgcaaccgcgcatatcagcgccatgtatgcggcatttctcgccgtcatcgtggcggcaggcgctccgccgctgttggcggcgctcagcctggcgtttttcagcaaccttttcggttcgacgacgcattacggctcaggagcggctccggtctttttcggagcgggttatatctcgcaaagcaaatggtggtccatcggctttatcctgtcaatcgtccatattgtgacatggcttgtgatcggcggattatggtggaaagtattagggttatggtagaagaaaaaaggcagactcaggtctgccttttttttatttctgtaaggaatgggaagggcctgcacacgctgacttcagtgcgaatagaatattgccggggtgatattatgagcagcggccgtaatcaatacatgatattgaaacagaaaccttacaaatatatgagcagacatatgaaacgccggtatgaacaattaccatgtgaacttgaaagtccggaaacagggacggaaaaacggtttccgtcttcaaatgaaaatcgatctgccttgtgcgtacccgggctgcgaggtcccgaaggcaaaagaggacccgccggctcccgcggtccgcaaggggaggcgggtccgccgggtccgcccggtccgcccggtcccccggggcctgaggggccgccgggagcggttcctgcggtagcttttcaaaatacagcagacctaatgacgcttccgttagaaggaacaccgataaacgtgttaagcgcagtgatagctgcgccgacagatcaattggtgaaaacggatgccgtcatacaagtaaatgtggaattagatccgcttgcgtctcatttctcattggtcttagctgtcgagctgcaaagaaatggcgtaacgatacaaacacagagacaagagcggaacctcttttcttcaggcggacaaatcataggaattccttttacgtacatcgacgaaatgaaggcggatgaaacagccgcgtatcagctctatttatccgtcctttcttcgaactacgtaacacaagtcgcagcagcaaaccgctccctcattgcgacgggattccccattcaaggatcggattaaggtgatgaaaagaaatcaccttttttatttaggttgtcaaaacacagcccgtattaatatgctgtcttaataagtaagacggtcaacaacgggaaggagagggaaaaagattgaatgaataatccgattataaacggaagctttgaaaccggcacattagcggggtggagttcggcaaatacccagattaacagtttgtttgcacattcagggagatattctgcgcaatttattggagctcagccatatgcttacctcagtcaaatcgttcccatttcagccaagtcagtgactctattcgtatcactcgcaacgctcggaaatgatccaagtccccaagtcactctccagatcatctatgtcagcgcagcaggtgaacaaatcagttccattcaagaaaatattacacccggaaatttgccgaacgtgctctttcacacatggtctgaaatctataaaacaagcagtgtgccttctggcgcggcctctgccgtcattgtattaagtaaagtttcttccggcacggttttaatagacgatgtttcattggcgcaaaccgggggtgaacctggcgtaacaggaattacaggtcccactggagtgacgggcccaacaggagtgaccggcgcaagaggagcgacgggagtaactggtgcaaccggggcaagaggagcgacgggtgtaaccggtccaaacggagtaactggtccgacaggagtaactggagcaaccggctcgactggtgtaacaggagcgaccggaaccacgggctcaaccggagtgactggagtaacgggagcaactggttcaaccggttcaaccggagcgactggggtaacgggtgtaactgggggaacgggaacaaccggcccaactggagcaacggggataacaggagcaacaggcccatccggagcaacggggataaccggcgcgaccggtataacaggtccaactggatcgacaggagaaaccggcccaaccggagtaacaggggcgacaggagaaaccggtccaaccggagcaactggttcaacgggagtaactggagcaacaggcccaacaggaacaaccggtccaactggagtaacaggagcaacaggctcgactggcataacgggaacaaccggcccaactggtgaaaccggagaaaccggggcgacgggagtaaccggatcaacaggagtaacaggattaaccggtgcaacgggatcgacaggctcgactggggtaacaggatcaaccggtgcaacgggagaaactggttcaacaggagtaactggctcaaccggtgtaacgggagtaacaggagcgaccggagtaacaggggtaacgggatcgacaggcccaaccggcccaaccggcccaacaggggcaacgggtgtaactgggggaacgggaccaacaggttcaaccggagaaactggtgtgactggcccgatcggggtcacgggatcgacaggagcaaccggggcgacggggataaccggctcaaccggagtaacaggtccaacgggggaaacaggcgcgactggctcaaccggtccaaccggctcaaccggtccaataggagttactggcgcaaccggagaaactggcccaacaggagtgactggtgcaacaggctcaaccggagaaaccggctcaactggtgtaactggttcaacaggagaaaccggtgcaactggtgtaactggttcaacaggagaaactggagcgacgggagtaaccggatcgactggcgcaacgggatcaactggagtaacaggatcaacgggagaaacgggcccaactggagtaactgggacaacgggagaaaccggagcaacaggatcgactgggttaactggtgtaaccggatcaacaggctcaactggttcaacgggagtgacaggttcaaccggatcaacaggcgcgactggctcaacaggagcaaccggcccaaccggagtaacgggatcaacaggagcaaccgggtcaactggagtaacaggtacaacaggcctaacgggtgtaacgggtccaacaggagtaactgggacaacggggataaccggatcgaccggggtaacgggaccaaccggaccgacaggatcaaccggctcaactggtgcgacgggattaactggagaaaccggcgcaaccgggggaacaggttcaactggttcaacaggagcaacgggatcaaccggtccaaccgggccaacagggtcgacaggttcaactggagttactggtgcagcaggatcaactggacccacgggagagatcggtccaacgggatcgccaggctcaaccggagaaaccggtgcaacgggagctactggagtaaccggcccaacaggggcaacgggtgtaacgggagcgaccggagtaacaggggtaacgggatctacaggctcaaccggcccaaccggcccaacaggggcaatgggtgtaactggagaaatcggcgcaactggagagaccggtccaactggatctacaggttcaaccggaataacaggggcaacgggttcaaccggaccgacgggctcaacgggagaaaccggtgcaaccggtgcaacgggagtaacaggagaaacaggcgcgactggctcatcaggctcaactggagtaacaggagcaacgggatcaaccggcccaaccggcccaaccggaataacaggtccaaccgggggaacagggtcgacaggtccaaccgggggaacagggtcgacaggtccaaccgggggaacagggtcgacaggtccaaccgggggaacagggtcgacaggagaaaccggcccaactggctcgaccggggatactggagctactggagtaactggagctactggagtaactggtgcaacaggagaaaccggagcgactggtgtaacaggcccaactggttcaaccggagaaaccggggcgacgggagtaaccggatcaacaggagtaacaggatcaaccggtgcaacgggagaaactggcccaacaggagtaactggctcaaccggcccaaccggtgtaacgggagtaacaggagcgaccggagtaacaggggcaacgggtgtaactgggggaacgggcccaaccggaccgacaggagaaaccggcgcaaccgggggaacaggttcaactggttcaacaggagcaacgggagtaacaggagcaacgggatcaaccggtccaaccggtccaaccgggtcgacaggttcaactggagttactggtgcagcaggatcaactggacccacgggagagatcggtccaactggatcgccaggctcaaccggagaaaccggtgcaacgggagcgactggggtaactggtataaccgggggaacgggaacaaccggcccaaccggagcaacgggggtaacaggcccaactggtgaaacgggtgtaacgggagtaacaggatcaaccggtgcaacgggagaaactggcccaacaggagtaactggctcaaccggcccaaccggtgtaacgggagtaacaggagcgaccggagtaacaggggtaacgggatcgaccggcccaaccggaccaagcggcccaaccggcgcaacaggggcaacgggtgtaactgggggaacgggcccaaccggaccgacaggagcagccggctcaaccggctcaactggtgcgacgggaataactggagaaacaggcgcaaccgggggaacaggttcaactggtttaacaggagcaacgggaccaaccggagtgactggagcaacaggagccaccggtgcgacggggataaccggctcaaccggagtaacaggtccaacgggagaaaccggtgcaactggagtaactggagcaaccggggaaactggctcgaccggggataccggagctactggagtaaccggcccaacaggggcaacgggggtaactggagagaccggtccaatcggagcaacgggttcaaccggagaaactggttcaacaggaacaaccggggtgacgggagtaaccggatcaacaggagtaacaggttcaaccggtgcaacgggatcgacaggagcgactggggtaactgggacaacaggagtaaccggtgcaacgggagaaacgggaccaaccggagccacgggagtaactggttcaactggaataaccggatcgaccggtccaaccggtccaaccggcccaacaggtgtaacaggagaaaccggagtaactgggacaacgggagaaaccggtgcaactggagtgactggagcaacggggataacaggagcaacaggtgcgacgagcccaaccggtgtgactggaccaacaggggttactggctcaacaggagaaaccggagccacgggctcaactggagtaactggagcgaccggtgtaactgggtcaacaggaataaccggaccgactggctcaacgggagaaaccggctcaaccggtgcaacgggaataactggagaaaccggagcaaccggatcaactggcccaaccggagcaacaggtgcaaccggagtaacgggatcaacaggagcaaccgggtcaactggagtaacaggtacaacaggcctaacgggtgtaacgggtccaacaggagtgactgggacaacggggataaccggagcgactggggtaacgggtgtaaccgggggaacgggcccaaccggaccgacaggagcagccggctcaaccggctcaactggtgcgacgggaataactggagaaacaggcgcaaccgggggaacaggttcaactggtttaacaggagcaacgggaccaaccggagtgactggagcaacaggagccaccggagtaacgggtctaactggtgtaacgggatcgacaggagcgactggggtaacgggagcaaccggccccaccggagtaacgggtctaactggtgtaacgggatcgacaggagcgactggggtaacgggagcaaccggccccaccggagtaacgggtctaactggtgtaacgggatcgacaggagcgactggggtaacgggagtaaccggctcaactggtgcgacgggattaactggagaaacaggcgccacaggatcgacaggcccaaccggcgcaacagggccaacaggtttaacaggatcaacaggagcaaccggaaccacgggctcaactggagtaacaggagcgacaggagaaaccggcgcaacaggggcaacgggggtaactggagaaatcggaccaactggctcaaccggtgcaactggctcaactggctcaactggctcaactggctcaaccggcgcaaccggagtaacgggtccaactggcgcgactggctcaaccggcgcaaccggagtaacgggtccaactggcgcgactggctcaacaggagaaaccggtgcaactggatcgactggcgcaaccggtccaacgggtgtgactggagcaacgggagaaaccggctcaactggcgcaacgggtgcatccggggcgaccggcgcaacgggaataactggagaaaccggagcaacaggatcgactggggtaactggtgtaaccggagcaacaggctcaactggttcaacgggagtgacaggagcaactggttcaacgggagtgacaggagcaactggttcaacgggagtgacaggagcaactggggcaacgggggtaactggagcgaccggtccaaccggatcaactggttcaacgggagtaactggagcaaccggatcaactggttcaataggagaaaccggagcgaccggtgtaacagggtcaacaggaataaccggtgtaactggctcaaccggcccaactggtgaaacaggagcgacgggagtaacaggcccaacaggtgtaacaggagaaaccggaaccacgggatcaaccggagtaactgggacaacgggagaaaccggtgcaactggagtgactggagcaacggggataacaggagcaacaggcgcgacgggcccaaccggtgtgactggaccaacaggagaaaccggttcaacgggtgtgactggagccacaggagcaacaggatcgactggggtaactggtgtaaccggatcaacaggctcaaccggagtaacaggggcgacaggagtaacaggggcgacaggagaaaccggagcgactggcccaaccggagcaactggcccaaccggagcaactggggcaacgggggtaactggagcgaccggtccaaccggggtaactgggacaacgggagaaaccggtgcaacaggagtgactggagcaacggggataaccggagcaacaggcgcgacgggcccaaccggtgtgactggaccaacaggagaaaccggagcaacgggctcaactggtgtaaccggtgtgactggatcaacagggttactggctcaaccggagaaaccggttcaacgggtgtgactggagcaacgggtgtgactggagccacaggagtaacgggatcaacaggagccactggagtgactggggcaacggggataaccggagcgactggcgcaacaggagtaacaggttcaaccggagaaacgggtccaacaggagtaacaggggccactggagaaactggcccaacaggaatcacgggtccaacaggagccacaggagtaacgggatcaacaggagccactggagtgactggggcaacggggataaccggagcgactggcgcaacaggagtaacaggttcaaccggagaaacgggtccaacaggtgtaacaggactaactggagcaacgggagtaacaggcccaaccggtccaacgggtgtgactggagcaacgggtgtaactggagcaacgggtgtaactggagcaacgggtgtaactggagcaacgggtgtaactggagcaacgggtgtaactggagcaacgggtgtaactggagcaacgggtgtaactggagcaacgggtgtaactggagcaacgggtgtaactggagcaacgggtgtaactggagcaacgggtgtaactggagcaacgggtgtgactggagcaacaggagccactggagcaactggagtaacaggagtaactggagtaacaggagtaacgggtgcaaccggagtaacaggcccaaccggtccaacgggtgtgactggagcaacgggtgtgacaggagcaactggagcaactggagcaacgggagtaacaggagcaaccggagtaacgggagtaacaggagcaaccggagtaacgggagtaacgggagcaaccggagtaacaggagcaacgggagtaacaggagtaacgggatcaaccggagtaaccggggtgactggcccaactggagtaacgggcccaaccggaccaaccggcgccacaggcagtacaccaaccttgctcttcacaagaaccaacgggccgctcactgtttatccgccgttaaatacagaagttcccgttgctacgctggcaatcccagttaatgctttgcagaatgtaaagctggattatgcactcagtgccgcgttaacaactgcagcgaattcaaactttgtttttgaagtgagattatataggggagcagtgcaaattcatacaagaactctgtcgcgaaccagtactctcgcagctacggatagtttttcgattgctgatacaacagtggatactgcgccgaccgcaggaacgaacacttaccagctcagggttattttcacaactgctaataatttaacgacagcaactgcactcaatatcgattttaacagcataagttttccgacaacctaatacaacagcagactgatattttaaagatgaaagacctgacttatgcacagttaggtcttttttctgtaaaatgctgtgcatgatgcagtcttaacgaacatttgaaaaattgcccaatagaagtggggttttgccacaccttttttctctgtggaaatattatgaaaatagaggtggtgtaatgagaaaaggagatacttggtataacagatacgattcttgggattacgactgccgaaattgtaatgagtgttgctgtcattttcaacataaaagaagaaatcaaaggcgcagttatcaaaatcgggcacattgctgtgaaggattctgttgcgaacccccttgctgtcatgaaagatggtgtccatgctgtcatccaaatcattttcacgtaagaggattcaccggagcaacggggtgcaccggagcaacaggactgaccggagcaacaggactgaccggagcaacaggactgaccggagcaacagggctgactggagcaacggggttcactggagcaacagggctgactggagcaacggggttcactggagcaacagggctgactggagcaacggggttcactggagcaacaggactgaccggagcaacgggctcgaccgggaataccggagcgactggggtaaccggtgccactggagtcactggagatcccggcgccacgggagtaacgggagccaccgggataacaggcgctaccggggtaaccggagcgacaggagtaacgggagcgacaggaataacaggagccaccggggtaacaggcgtaaccggagcgattggagtaacgggagccactggagtaaccggggatactggagctaccgggataacgggcacgaccggagtaacgggagcgacaggaataacaggagccaccggggtaacaggcgtaaccggagcgattggagtaacgggagccactgggatcaccggagctaccggagtaactggggtaaccggagtaacaggagccaccggggctactggagccactgggataactggagccactgggataacaggagcgacaggagtaacgggagccaccggggtaaccggagcgactggagtaacgggggcaaccggagcgactggagtaacgggggcaaccggggctactggagtaactggggtaaccggagtgaccggagtaacaggcgcaaccggagtaaccggggatactggcgctacaggagccactgggatcaccggagcgactggagtaactggggtaaccggatcgaccggagtaacgggagtaacaggagtaacaggagtaacgggagtaacgggagtaacaggagcgacaggaataacgggagctaccggggtaacaggcgctaccggagtaacaggagcgacaggaataacaggtgcaactgggatcaccggagcgactggagtaactgggatcaccggagcgactggagtaactggggtaaccggatcgaccggagtaacgggagcaaccggagcaaccggggctactggagcaacaggcgccaccgggatcaccggagtaaccggagtaacaggcgctactggagcaacaggcgccaccgggatcaccggagcaggcgcgatcattccttacgcttcaggtcttcccactgccgtgacgaccattgccggcggattaatcggaacggtgagccttgtcgggttcggcaattctgtgacgggcgtcaatgtcggagggggaggtgcaattgatcttaccggggctggaggaactctgctgaactttgctttttctgctccgagaagcggaaccattacatcaattgccgcctatttcagtacaaccgcagcattgtcgcttgtcggctcgactgttacgataaccgcacaactatacagttctactgtgccgaacaatacgttcacgccgatccccggagcatccgtcactttagctcctcccctcaccggcgtattgtcaatcggcagcatcagcaacggaatcacgacagggctgaacattgcggtaactcctcaaacccggctgttaatggtattctctgccactgcgacaggcctttcgcttattaatacagtggcgggatatgcaagcgcgggggttacgatttcttaagtgagaacggccagactggtgcggatcatctaagctaagcttggagaagatatcattttttcttcaagcttttttgtttttacgtctttctgtaaaggctgacgggaatttcccgacagtcggcagaagtatttacatgccttttgaagttaatcagtatcttaatgaagacgttttcagtgagttcgaatcatccgttgtgccgggagtgtgaatcatcatcgaaacagcggtgccctcatccggggtgctggtgatcgtcaattcgcttccgcaaaaatgcttcagccgccgattgatatttttcaggccgacactgcgattaacatcagaagacaaaatatctttctgtatgtccggcatgatgccggttccattatcctccactttgataagatacgtgttttcgccttgttttttcgctgtcagctttatccgtccgccgcctcttttcttactgatcccgtgatgaacggcgttttccaccaatggctgtatcattaaaggcggaagggggaagtcaatgtcctgttcaatatcaaaaaggatatcaagccgtttgccgaagcgtgttttttctatagaaagatatgacgtaatgatagaaagttcgtttctgaatgagctgatgtccgaagtgttttgaaaatcaaaactcatccttaaatagtttgtaaatgcagcagtggtttcccttgctttttcaatatccaaatggctgagcgcgataatcgtatttaatacattgtaaagaaaatgaggcttaatctgcgactgaagaaatgccatttctaaatttgtggcttggtgagccgtatgcttcattaaaattaaatttttaatacgcgcggtgaattcagagtaatgataaggcttttgtaaaatgtcgtttgctccggcatgaaacgccttgtatttgtcatggctgataatggctgccgtaacgataagaaccggcagatcgaccatgctgaacctttcgcggatgtttgtgcagacttcaaaacccgtcatgtcaggcatcatcaagtctaatatgaccaagtcaagcttcgaggaagagacagcttgaagcgcctcttttccgctttttactgcgattacgttataaggaacaccttccagcatatcaattaaaattttcaaactctcgatattatcgtcgacaatcagaatcgtcggagcatcgattttctctgagtgataaggcgtgaccaacgaaatatccggtattctctgtccgggctgtgatttaggaagttcggtctttgcttccggtaaagaaacaatttgagcggcgggtaacgtaaaatgaaaggctgatccttgcgccgccgctgactccgcccagatgtccccgttttggagcttgacgagctgtttcacaatacttaaacctaaacccgttccatcttcttccttccctcccgcttgctgaaaagaatcaaaaatggtttcaagatcagcctcaggaatgccgctgccggaatcggtcacggttatttgaatcattttgtcattcaggtttgcggcggaaagaataatgttcccctcggatgtgtacttgattgcattttcaataagattggttaagatttgccggaatcggttttcatctgcaagcaccaaagggagatcgtccggcacatgattaagaatcgcgagttttttatgtttggataaaagccggtagaagttcatctcactgcatatgacggcatgcacatcgacgggaaccggacgaatctgcagcatcccctgcttcattttttccaaatcaagaatatcatttacgagatcggaaagtctgtagcccatacggatgatcagctgcatattttctttctcttcctctatcgtcttcttttttctgccggctacaagggtttggcatatattaataatgctgttcagcggcgtcttgaattcgtgtgaagttttggcgataaattcatctttcagttggtccattttgactaatttccgtgagaggacttcattgtcccggaaagctccggcgaattgctgcgccatcaggagaaccaccgccaataaagcgatgactgtcggcaatgaatagatcgaattaaaagaaaaagctgttttgccgctgtaagctgaaatggtcgtaagaatcacaaaagcgctcatcgagacggatgcgagtgtaaggtacgtgcttccttttatttttcttatggcggcaatcgtaaaaatatatgtaatataaaacagagtcgtaacggccagcacagaatgtaaaatgtatgagaggtgatcaatgaaacttccggacataaaatcagtgatcaagatgatcccggataaagcggttaaaatggtgatcgtcgtttttgaaacaatttctctgtatgcataaaagagataaagaaaaaccgccatgctgacaagcacggttgagatgatacgcaaggaattcagcaatgaaaatgaaatagacggaaagaggagaaagataattctttctttcccgatcataagaataatggctgaaaaaagcagacacatcacggaaaagaacaataaatgtttatcctttgtccgttgcagaaaaaagccgagaaaatataaaccggtaatgaaaaaagccgtaatcataatggaatcattaaaaaaggaaatttgattctcgcgtataatttgttcttgagtcccaaacgttatcggttttgcgatcccccagccgggaacttttccgaaattcgaaaaatgcaggacaagttcattgtcacccttgcgaagcctgaaaaagctgctgtacggtttgttctgcgccttaaaatcagctttttctgaaggattgccgctctgtccgattacttttccattaagataaaggcggtttgaactgtagatataagatgtgctgatccccaaaacctgattgtcttcatttgatcggattgtcagtttgtacgttccgtaatccacgtcggccgtttttccgaacagcttcacattgacagggacatcaacgagtacgggattttttccttttgctgaatgaagcgcctgcggtgacagcatctgatttggatatagaatccatttcccgttcagctggacatttccatccttttgaaaatcccaattttccagattgatcacgccctgttccgcttgagggagggatgatcctgaaaaatgatccatggccataaaaatcataaagaaagcagcatagccgcaaataatcgtaatcgaaataaatttttctttcacatcattactcctttatcccattcaggggcattctattatcctatttaatgtataaatattgtaatcacaaacgttataatacaacaagagaaagaaaaagaatccaactatatagggcattgggcatggtataattgaaattattttcagatatatctatattgacgggtgggatgcggtttgaaagcgttaattgtggatgatgaggaactggcattgcttcattttaatcgtatgcttgagcggacaaacgcctttcaatctattataacgtttcaagatccggcggaagttctggagcattcggaactttcagcagctgatgcggtgtttcttgacattgaaatgcccgggataaacggtattgagcttgctgaatcgattcaggaggtcaatgaaaatatccaagttatttttatcaccgcttataatgaattcgcgatcaaagcgtttgaattgaatgctgtcgattatctattaaaaccggttgacaatgcccggctgctgacaactgttgagcggatccgaatgaataaaaaactcaggtcggcggacgggaataccgggacggattatgttatacaatgttttgggaacctggacttttatcaatcggtaaatggtgtcaaaacatacataacagtcaagtggagaacatccaaagcccgtgaactgtatgcatttttacttcttaatcaagggcgcacggtcagtaaagacatgctaatggagatgttttggcctgcttatgatatatcaaaagcaagcacccagctctactcgacaatatatcagatacggaaattaatcggtaagctgcccttcagccaatcaatagaaaatactgatataggatacattctccggctttccggggtaaagattgatacagttgaatgggaaaaaacattcaaagaggctcctccgctcagcgcagctgcactaacccggcacatgaacatggtcatgtcatatgagaaccattatctcatggagaatggctatctgtgggcagagccggaaaaagcgcgtcttgcccatctgtggctcagcaaagcgtacgaactgattggttttctcatccaagagaagaacgatcgtcaagcgatggacgtttgcctgcaggttgagaaaatagagcccggtgacgataaaattatacaatacaaactgcagttatttaataaactgggaaaggtagaagaggcgataaaggaatacgaacgatataaacaattaaaagataaaatcaattgacgattgaatgaccggaccggctgatgccggtctttttttgtgcgctatttctgaaatgatcccatgtacagaatttgtataggccgatttcatacaatgtagtttggttcggataaggagaatcccatgcttaccggcttgttcgaacgtaagtctatataaaaggggaggaataagacattgggagtgaggaacttttcgttcagcccgaaaaaaagcaaaaggctgagggcggcattgatttcatgcttcacgctgtttttcatcttcagccaagttgtcagctttactccgatcgcagccgcttccggatcacaacatagcgagagcgggttctttgattcagttgcagtcaaagacggcagacagcagaccgttgacggatcaaaagccggtgaaccggctttaacaccgggagataaagtgacactgacatacgaatggtcactaaaacacaaagaagatgcaagtgaccggaatatcaccgtaaagattccggaaagttttacattagataatgatgccgaaggtgagctgaaatcagctgatcgggtgatcggtatatataaagctgaagcaaacagaagcacgctggaagtgaaagtgaacgatgctgaagcggatgccggggatgccaaaggctccattacactgtcggcgaagtttactcccgacataacagatgagacgaaaatggcaaaagctctttttcaactggatgccggcaagacccagcaagtgttaatacctgtgaagaaagacggaacaacggattccgatacagaaaaaaacacctcttcaacacctgctgaacctcaggataagacagagaaaaaatcagcatctgcagacggcggggataaagcagaacaggcaacgaaatcaaaaccttctgctaaacgcagtcaatcaaaaatggtgattacaagcaaatctgccgctaaaagccttcaatcaggcggaaaccggattacgcaaaatattttaactgatgtgaaattgacggatgaaaaaggaaaaccatatgacaaaaacaaccctgcgaatacgaactctccggcgaatatcaccatccaatgggcgattccgaatgagctggggaaaacaataaacgacggtgatcgatatgaatttgacctgcctaaagaatttattatgcataatgacattacgaaccagccattgaccgacggcgatagtacgtacggaactttttccattaatacgagcggccatgtcatcatgacgtttaacggcgaggtaaaagaagattctaacgtcaaggggtcattgtatgtaaacacccaattcaatcagaaagaaataaaaggatcaaccacacaaaagattaagtttccggttaactctgatacgccggacgtaacggtttattttaaaccgaatgtcaataaaaccattgagaaatcagggtcattggataaaggcattaatcccggaaaggtaacgtggacggttgaccttaataaaaaggaagaagaagttaaaaatgcgaaattgactgaaagccttccggacgaattgactttccgctctgtgaaagtgtatgaacttgatgtgaatattgacggctcggtgagtcagggaaatgagataacttcaggttataccgttggcgaaaacggtaatgtcaccttcgccgggacaattgattcagcctaccggctcatatatgacacggaaattaaagatgaggcaaagccgggtaaaggcggaaacatcacgctgacaaacaaggcggcattcagcggagacaatgcggagccgatttctgcggaagcttccgtaacagcgggttacggaaaaatgatagaaaaatcttcgacaggttataaaggagaaacccaaacgttcagctgggctgttatgtacaactacggtgagaaaaagattgatcaatccaaagccggcattaaggatacgttcggatcagacgatctgcatctagttcccggatcattgaaagtccttccgattacattcagccagaacggcagcgaacaagagggcgccccattaaaagagggtgatgattatacgctgactgataacgggaacggctttgaaataaaattcaagcaaactgtcacaggagcatataagatcatttatcaatctcaagtcaacgatggggtcattattgacagtcctgtcaaatacaccaatacagcaatgacagatacgggggactcaaaggaaactccgggaaccgccattcagcagaatctgatcaaacattattcaaacgcagactatgagaagaagacggttgattggacaatcacagttaacaaaaacggttacacaatgaaagactggacgctggatgatcaattcaccagcggaggcctggcgctcattgacgattcatttaacatgcaagacacgactgaaaacaaaacgctgaaagaaggaacggattatacattaacaaaaaaacccggaaatcaaggctttacaatagcattgatcggggactacgcagaaacaaacagtcagtttaagatcacgtataagacaaaattcaacgctgacttttcaaacgaaacgattaaaaatacggcggagtcgacatggaccgataaaaacggcaacaaacgcacaaataaggaatcgagcggcttcacaccgaacaatcagacgtcccataacggattcaaaaacggctcatacaacgccgtttcaaaagaaatcacatggaaagtcggcatcaattacaatggcgaaccttcaaaacatccttatataaaagatacgatcacagatggtcagcaatttttgcatgggtcggttgctgttaaaacgtataccatcagcaaaaacggctccatcactgaaggagaggcgctggatccttcaaaatatgaaatagaagagccgtcagacggcaacaaaaatacgttaaccgtacatctcaaaacagatgacgctgtaccatacctgattgaatttaaaacgtcattaaaaggccaggtcattaaacagaatcaatacacaaacaaagcagagtactttaataatgaccatgcagaccgaacgctgacgggttcagtttccgtcgcaaacggaggaaacctgatttctaaaggcggcaaacagaacggaaacaatatcgattggaacatcaatgtcaatgccagccaatcgacactggatgacgtaaaagtcaaagacacaccggatgagaatcaaataatagatgaagattcttttaaagtatatcaagcaaaatataatgagaacggcgttatgaaagacagcagcggaaatcttattccgggtgatgtgcagcttgagaaagataaggactataaattagatatgaaaactgacaatgccaccggtgaacaatcatttgcccttacctttacaggcggctataaacaaatcgaccgtgcgtatgtcatacaatatcgttctctcattaatatttccggcagcagcggtcaggtcaacaacaaagtgtcgatatcagggacgaatgttgaggagcagacccaagagaacaacagctcagtgtttgtcgctatttcaagcggcggcggctcagggtcaggggagaagggaagcctgacgatatctaaaacaggatcagacggaacatctctttcaggagcagactttcaattatggtctaaagacggcaagcagctgctgcgtacgggcacaacagacgatgccggtaaacttacgtttgggaatatccgttacggaacctatgtactgaaagaaataaaagcgccggacggctacaccatcagcgatgcttatgtaaacggggtctccgttacgattgacggcaaatcctccgcagcaggagcactctataaagtcataaatcaaaaaaataaggtgacgcttatcaaaaaagacgaaaacaataatcctttggccggtgctgtatttaagcttgagaaaaaatcaagcgacggtacctatactctgataaaaaataatattgaaagcgataaaaatgggaaagttgagatcaacggtttgcccgccggatactaccggctgatggagacgaaagccccatcagggtttatcgtaaacacaaaagccattcacttctcaatcgcaaagaacgaaaagaatcaagtacctgatgttgaattgggatcaatggtgaattataaaggaaaagccgctttaacgaagaaagatgcagacggcgggaaccttgaaggcgcagttttcaaaatcgtcgatagtgatggaaaaatagttcaggacgatctggtttcagataaggacggaaaagtagaaacatccggccttgccccgggtcattacgccttcatcgaaacgaaagcgcctgacggctatgtgttaaatacggagaaagtggagtttaccatctcagaaacagcggaaggaaagccggagtcaactgacgcaggaacggccgtcaactataaaggctctgtgttgctgacgaaggaagatgcggaaggccgaaaccttgaaggtgcagttttcaaaatcgtcgatagtgatggaaaaatagttcaggacgatctggtttcagataaggacggaaaagtagaaacatccggccttgccccgggtcattacgccttcatcgaaacgaaagcgcctgacggctatgtgttaaatacgaagaaagtggagtttaccatctcagaaacagcggaaggaaagccggagtcaactgacgcaggaacggccgtcaactataaaggctctgtccggctgacgaaggaagatgcggaaggccgaaaccttgaaggtgcagtcttcaaaatcgtcgaccgtgatggaaaaacggttcaggacgatctggtttcagataaagacggaaaagtagaaacatccggccttgcacccggtcattacgcattcattgaaacgaaagcgcctgacggttatgtgttaaatacggagaaaaaagagtttaccatctcagaaacagcggaaggaaagccgaagccgtctgagaccggcacctttgtcaactataaaggctctgtccagctggttaagaaggatcaagacggaaacgttttagacggtgcagtatttaaaatcattgacagtgatggaaaaaccgtaagagaagatctgatgacaaaagaaggcggcaaaattgacgccggcggtttggcgcccggaaactatcaatttgttgaaacaaaagcgccggatggttatctgctgtcaacaacccctgtgcggtttacgattaaggctgagaacagcggaaaaccggatcaggctgccctgactgcagttaacatcaagaacagtgttgttcttacaaaattggatcaaggtgacaaacggaaagtcctgcaaggtgcgaagtttaatctgacagatgcaaacggcaaagtgctgagagaaggtctgacgacagatgagcacggacagattgttgtacggggactgaaagcaggcgaatatcaatttatcgaaacaaaagcgcctgaactttacagtttggatcaaacgccaatttcattcaagatcacaaataccgacataaaaccagtcgaaatcagtgcggagaatacactgacgccgggtgatgtaacactgacaaaagtggatcatgacgataaaaataaggtgctggaaggtgctgaattcaagataacggattctgccggacatccggtaaacaccggcggcagcaaagaacggccggcggtatggaagacggatcaaaagggccggtttacggtgaaaggattagcgcccgggcagtatcgatttatcgaaacaaaagcgcctgacggctatcagctgaacgaaaaaccaattgaattcacaattgaaaaaggacaatcaaaagctgttgaggtcgtcgtttctaataagaaattaaaaaatcccgcacctgggaaagacacaccgaatcatcaaacgaatcaaggcgggcatcaccctgataccaatagtaaaaccaatcacccggatacaggcaaaaatctgccgaaaaccggtgatacggacggtatgatgccggtcacggccggtattctgctgctattagccggcggagccgcggctgttgtatcaagaaagaagaaagcaaggaatagatagacgtaatcgcacctgatcatgtaagaatcgatcaggtgcttttttaaaaagagaatcatttctcaccaaatactcaccgcatgacgtacaagaaaggaattttcttcatggttaaaaaaatgatcattgccgttcttattttgtccgggctgcttctcatttcctctcctctcatgaaaggctgtttgattgcgtacctcagtaaaagccaaattgaatcggaattgaccgcagaacaagcgcggaaaaataacatgaaaaaagcggactatgaatttgaatccattcatccgcccggtttcagggaaacagttcagtcaagttttaatcgcaaaccgaaaccgataatcggacggataaccatcagcagcatcgatttagaccttccgattttaaaaggcacaaccaatgaaaacctgctgatcggcgcggcaactatgcgtccggatcagaaaatgggcgagggaaactacccgttggcaggccaccatctgaagcaggagaacctattgttcggccctcttttacacataaaaaaaggtgcgcaaatcgtgattaccgactttagaaaagactatatttattctgtaacatcaaaaaccatgatttcagaaatagaagcaaacgcaattcaggagacaaaagataaagagattacattaatcacatgcgacaaggcggtaagaaccgaaggacgcctggccgtcaaaggaaaattgattgatatttccggtcattcaaatgtatctcagccatcatagagaaacactttgtcaactgaatatacgtccgttgtgaaacatcccgagactggctcctgtcagtctttttttgcgcagcgattataaaaagttcatccttcttatctctcttgagggaaattataccagactgcactttttgaaagaaatgacaagagaaaaagatcgcgaaaattctcaaaaatgagaaatgaagatttaaaaaatggtatgattttaggaggaaaggacggctggtgctgtgttggaagcgaagcggttttatgtctctctgcaaatgaaaatcgccggattaattacggctttattaatacttgtcatcggaacgctcacggttatatttgcctttcagcaattaaaggaagggcagaagcaggctgaacagctggcggtgcaaacggcaaaaaccatttcatatatgcctcccgtaaaagaggcgttccggcttgcggatcaagaggcttttacaaagttagacgtcattgaacaaatgaaagaacaggcaggcgcgcacgccgtctacatcactgatcaaaaagggcatgttgcatttcattcggcccgaagcagtattccgaaagaaaatcaaaatctgcaaaataaaaccgtcatgttcggcgggtctccggtttccgacggaatgaaggccgtccggggaagcgccccggttattttggaggaaaaaaatcataacgaagtcgtcggaacggtgacagtcgaatttctacaagatgagatagaaaaagatatgaaggcgcatttgcggcatttaggctattttgcatgtttggtgtttcttatcggcatcgggggagcggcggcgctcgcaaaaagcatccgtaaagatacactcggccttgaaccgcatgaaattgcagcgctgtacagggaacgcaatgcgatgctccttgcgatgaaagaagggattatcgccgtaaacaaagaaggcgcggtaaccatgatgaatttatctgcggctgatatgctgaatcttccggaaccgatgatcggaaggcatataaaagaaatcatgccgggcgcaaagctcatgccggtgttggcagggggagaattaccgccgaacgtggaggtgcgtgccggagataaagtatttatcttaaacgtgaaagaaatgaagcagaacggacaagtatacggagcggtgatcagcttccgcgaaaaaacggagctcaagaaactgattaacaagctgactgaaatgaaaaaatactcggaggatctccgggcgcaaacgcatgaattctcgaataagctttacgcgatactcggtctgttagagctgggagaatataatgaagccattgaactgataaaagaagagtacgccatccagaatgaacagcacgaaatcctctttcaaaacattcattcacagcgggttcaggccatactattaggaaaaatgggaaaggcgtctgagaagaaagtgaagctttcaatagatgaaaacagctttttagaatcgctgccggagcatgtgggttcatcccagctcattacgatcatcggaaatcttattgataacgctttcgaagccgtcgccgaaaaagagaaaaaagaggtatccttttttatgaccgatatcggcagggatatcgtcatcgaagtggcggattcaggagacggcgtgcctcaggaaaaaacagaaacgatatttgaaaagggctactcttcaaaggggacaaggagaggatacggcttagccaatctgaaagaagccgtcagtgagttgcagggagcgattgagatttcgcagcaaaagagcggcggtgccgtatttacggtgtttataccgaaagaaaggccaaagggggaatcggtgtgattaacatcgcgattgcagaggacgactttcgaatagcgcaaattcacgaaaaatttatcgaacatcttgatggattcaatgtcatcggcaaagcaatcaatgccaaagacaccatatcgctgcttgagaaacggcagcctgatctgctgctattggatatttatatgccggatgagctgggaacagatctgctcccgcttatccgcggccgttttccttccgttgatatcatcattattacggcttctgccgaaacaaggctgctgcaggaagcgctcagatcaggcgttgcccattatgtcataaaaccggtgtcggcacataaatttacagaagtgcttttgcagtaccgtgaaaaaagagaatggctgcactcacagccggagctgagccagtccgtgattgacatgtttttcggaagcggtcagaaagaacaaaaacagcacaatgatctgccgaccgggattaattcgattacgcttcaaaaaatcaaaaacgcgctcagaacggcccaaaaagggatgacggctgaagaactgggagaaaaaatgggtgcctccagaacaacggcgcggcgctacgccgagtttctcgtttctcgggaagaagcgctcgctgaattagagtacggcattatcggcaggccggaacggaaatattatttagcacatgagtaagggatgggagaaatgaagcggttgggagtgcttcttgtcatgctggcggcgctggtttcttttgacggacggcaggcggcgggcatccgttcagctgaagggccggttgaaatagtcgtcccggcagcgcctcaaggggctgggacgtaacggcaaaagctttgcaatcggtaatagagcggaagcaaatattaggccggcccgtaaagatcatctataaacccggaggaggcggagacagcggctggaaatatgtaaacgaacgaaaaacggatgtcatcagtatgaattcaagtctgctgttaagcaatgaaattttgggacaaagccggctgaaggcagctgattttacgcctttggccattatcgcaaaagagtggcagaccgtcgctcttccgaaggattcaaagataaaaagcggaaagcggctgctcggcgatattaaagcaaatccgggcggcataaaaatcggatttgcgcccggcctcggaaatgatgaccagctctcctttgcgagagcggcggaaatggccggaatttctccgtttgatatccgcttttttcaatacggaagcagcaatgaagtcattgaagctcttatcagtcacgagatagacgccgcctcaatgaccatttcagaagcgagagacgcctatcggaaagggaaaatcacattggcggccgttacgtctgacaaaaggctctccggcttcagcgatgtgccgacatggaaagagcagggggtgccgtttgtctttgcgcactggagaggcatcatggggccgaaagacatgaccgaaggcgagatcgcctattgggatcaggctttgaaacagattacttcatccgcggagtggaagcaaatgttgaaaaaacgggattgggagagcttttataaaaacagcagcggcgcaaaacgctttttagaagagcagaccgagttttataaagagatgatgagcagcgaaaaataagccttccgcatatttgcggaaggcttttgatttataaatgaacaaaatgaacgaaaaggttataaaaaattaaaaatctttaaaatccaaaatatttacttcaatatccaattctcataagatagcaaaaaggcggataaaggggatcgggcctttaaaatgtaagcgtattcatgatgagggggacatactgtgttagcaatcttaggctttcttatgatgcttgtttttatggtgctgattatgacaaaacggctttcagtgttaacggcgctcgtattaacgccgatcgtgtttgcgctgattgccgggttttcttttaaccgggtcggcgagatgatgatctccggtattgaacaggtggcgccgatcgcagtgatgattatgtttgcgattctttatttcggcattatgattgataccggtttatttgatccgatggtgtcgcgtattttaaagctggttaaaggcgacccgctcaaaattgtagtcggaacagccgttttgaccatgcttgtcgcactggacggagacggctcgacgacgtatatgattacgacaagcgcaatgctgcctttgtatatcatgctcggaatccgtccgattattttagcgggaatcgccggggtcggcatgggtatcatgaacacgattccatggggcggcgcggcgccgcgtgcggcgagtgcgctcggcgttgatccggcagagctgacggggccgatgctgcctgtcatcgcgagcggaatggtgtgtatgattgtggtcgcttatgtactcggaaggatggaaaggaaacggctcggggtgatcgaattaaagcagccgtcccatacaaatgaaacggctgcggctgcggaagatgaatggaagcggccgaaactgtggtggttcaatttactgttaacgctttctttagtgggatttttagtgtcaggaaaagtgaatttaaccgtgctgttcatcattgcgttttgtatcgcgctgattgtcaactatccgaaacttaatgatcaaagggagcgcatttcagcccattcgagcaatgtgcttgcgatcggttcgatgatttttgccgcaggcgtgtttaccggaattttaacggggacgaagatggttgatgaaatggccatttccctcgtatcgcttattccggaacagatgggaggttttattccggcgattgttgccttaacgagcggtatctttacgtttctgatgcctaatgacgcctatttttacggcgtgctgcccattttatctgagactgccgtggcgtacggtgtagataaggtggaaatcgcccgcgcttcgattatcggccagccgattcatatgttaagcccgctcgtgccgtcgacgcatttattagtcgggcttgccggggtcaccattgatgaacatcagaaatttgcgatgaaatgggcggttcttgccgttatcgtcatgacggcctttgcgctcatcatcggcgcaatcacgattttttaacataaaacacccggttcgtcgcacactaaaggcatcagaggaggtgccatgatgagtgatccgtttatgccgcttttttcagtgagaagcggcgccggttttaaagcggcggacggcgtttacggactgaccgtgcagattgcgaatgtttactttatcgaaaatccctcagctccgcgggaaatcattctggttgacgcgggaatgcctcaatcgtcggagatgattacaaatgaaatgaaacgccggttcaaagaggggtatgagctgaaggcggtcattttgacacacggtcattttgatcatgtcggtgcgattgaagaactgcttgagctttggaatgtgccggtttacattcatgaaaaggagcttccgtacgtcacggggaaagcggattatccgcctgccaggcccgatgcgaaaaaagggcttgtcgcaaagctgtcaccgctgtttccgcgccatacgatccgcattccgtccgttcaggcactgccttcagacggtaccgttccgtttcttgaagaatggaaatgggtgcatacgcccggtcacacacccggccatatttcattattccgggataaagaccgcgtgctgcttgccggtgatgccgtgatcactgttgaacaggaatcgcttgcggacgttgtcattcaaaagcaagagcttcacggtccgcccgcctattttacagcggatacgcagacggcggccgcatccgttcagaaattggcggaactggagccggaagcgcttttgacgggtcacggaattccgatgacgggaaaaaactaccgtgaggatttgcttacactggctgaaaaactgcattccgttttgtaaaacacctgcgaaaatcacaggtgttttttcttcgcagtttccagtatgatacaaaaaaaccattgtgttcacacctaaaaacgatacaatgggaaacagatgtaaattgaaggagagagttttttgaaacatacggaaatactttgggatgaggcgaaggattttattgatgtctgctatcacgaactcggaatggaatcgcaaatcaacgcgcgactgcacgcgataaaagatgagatagatcggacgggaagttacgtccatacggcggaagagcttgaacacggggcgaaaatggcgtggcgcaacagcaaccgctgtatcgggcgtctgttctggcaatcgctgaacgtcattgaccggcgcaatgtgaacacgaaagaagaggtgcgtgacgcattatttgaacatattgaaatcgccacgaacggcggaaaaattaaaccgacgattacgattttccctcctgagaagaacggggagaaacaagtggaaatctggaatcaccagctcatccgctatgcgggatatgagactgaaaaaggaagagtcggtgatccggcatcatatgagctgacggctgtctgcgaaaaactcggctggcgcgggaagcggaccgaatttgatattctgccgctgcttttccggatgaaaggggacgggcagccggtctggtatgacctgcctcagacgctcgtgaaagaagtgccgatcacccatccggatattgaagagtttgccgatttaaatctcaggtggtacggggttccgattatcgccgatatgaggcttgaaatcggcggactgtcgtacaacgcggcgccttttaacggatggtatatgggaactgaaatcggcgcaaggaaccttgctgacgaaaagcggtatgatatgctcaaaaaagccgcttcggtcatggggatttccgccagcctgaataccgacctgtggaaagatcaggtgctggtggaactgaataaggcagtgctctattcatacaaaaaacacggtgtcagcattgtcgatcaccatacggccgcgaatcaatttaaacgctttgaagaacaggaacaagacgcgggcagaaagctgacgggcgactggacctggctgattccgccgatctcgccggcttccacccacattttccataaatcatatgacaatacgattgtgaagccgaattatttttatcaggacaagccttatcagtaactgatggaaaaggtgcggtaccctttcagacggtgtgattcttcgatggttacgtttgtgacatttgagaaggggctgccttttctgaccgcttcggcaaattgttttaacgactcttcagggccttcggcaaggatttccacccggccgtcatcacggttttttacccagccggctatcttatgtctgtcggcttccatctggacgaagtagcgaaaacctacgccctgaacccggccgtctgcaatcatatgatactgaagcatggaaaaaccacctttttcttactatgataaaggaaaggtaggatatttcgcaaaggatgtgaacgagatgacgcaagactattctgtcttatctatcaatctcggaaagcccgcaattcatgaatttgccggcagacaaatcaattcaggcatcatcaagcggcccgcagattctcccgtcatgctgtataaaacccattttgacggggacgggcaggctgatctgaagcatcacggaggtcccgataaagcggtgtgcgtgtatcccgccgagcattattcatattgggaaacaacgctcgcgagaaaacttcccgccgccgcgttcggagagaatgtaacggtcaaaggactggccgaacaagacgtgtggatcggcgacatctttcagctgggtgaagccgtcgttcaagtaagccagccgcgccagccctgcgtcaaactcgcgctcaaatatggcatcaaagatatggtgctccgtgtacagcagacgggatttaccggcttttatttcagggtgcttgaagaaggatatgtcgatccgcgtcccgtcctcaagcgtctgtcgagaggcaaagaaagcatttccgtctggtatgcgaacgaagtgaaataccgtgattcagacaatctgtcagcgattgaagaaatactgcgggaagaagcgctgtcagaaagctggagggagtccttccttaaaaaaagggacaggctcactaatgtatagaaaaaaagccgtgctgcactgacagcacggctgatttacgttatgcttgtttctttgtttccagcagattggcaaggaagtactttttgaagctttgaagctttcttccttcatagtgggtaattccttttttctttaactcttctacataccagcctttactgccataatgcatgtcagaaaactcctttctccgttctcccgctggggaggtttcttcagtttttgccaaacttttggcattgtaacatctataaaaagacgctgaaaagggataatgcaaaaactgagcctttcgattcagagatgtaaagctttcttacatatatatgtaaagggcggtcttttcatgcttaatggccggttaattttaacagcaccgttccgagtgtcatgattccgaaaacgacgccgaaataaatcagcatccccttctttttcttcaccccgtaaacggtgagaatgatgctttcaataaagaaaataaacccgaagataataaaccacatgttgaaaaatggctcctttcacagacatatgtccagtgtagcacaactcttataacggagcataaaaaagccgggcactgtatcagtgtccggcaagtttgacgagaagctgggccaaatgctgtttttcattatcatccgcgatgtcccacagttcttgtaagagtttttcttccgcattgcggggctcctcgtgtttggcgagatagtccccgaggatggcggcgcttttgatgattttgctgtcatccagacccagtttttttccggcggaaattttctgatgaaggtacgccttaaattcctcgaaatcctctaaaatctgctgtttcgttacgccgtgcatggcgtgtatttcgttttcaattttgattttttctttatcttttttcatgcgtctccctccttcgggttagttgttgtatacctgttcgggagggagatgaaacattacaatgcagttaaaataatcggtttgtcttttgtaatcacgatggtgtgttccacttgggcgacaaggcttttatccggcgttttatatgtccagccgtctcccgcttcaacaatcgtttccgctttcgtggaaataaacggctcaagcgcgatcacggttccgtttttaaacagcgcgttatcaaacggatcgtagtaattcatgatgtggttcggcgcttcatggaggtttctgccgattccgtggcccgtcagcgttttaatgacggtaaatccgttggagcgggcttcatggtagacggctctgccgatctggttttgacgtttgccggcttttgcctgatccaatcctttctgaaatgcggatgccgcgcagttacaaagcttttgcagacgttcatcgccttctccgagcacaaatgaaatgcccgtatcggaataaaaaccgccgaactccgccgaaatatcgatattgacaagatctccggcttttaagattttagaggcgctcggaatgccgtgagcgacttcgtcatttacgctgatgcatgtcacgcccgggaaatcgtattccttctccggagcggaagcggctccgtgctcgtcaagcaccgcctttccgatcaggtcaagatctttcgtgctcatgccgggctcggcttttttcttcatttcttcacgcgccagcgcgacgattctgccgatttttttaaggccttctaattcttgatcgttcgttacaatcattgtcattcccgctttctatttttaatcatctgattcaagcttaccacaactggtttataaatagaaaaccaacaagccttatgtgaataaatgaaggaaaattggtatagatcactagataacttatgtggtatatttaagaaaaaagaagggggatgggtaaaatgcttcaatttttgcaaaaactcggaaagtcttttatgcttccgattgccgttctgcccgccgttggtattattttggccatcggcagagaggacttattaaatattccgttcatttacgcggcggggaccgcggtatttgatcatctgccgctgattttcgcgatcggaatcgcgatcgggatttcgaaagacagcaacggggccgccgctctgtcgggagccatttcttatatcatgctggacgcggctgtaaaatcaatcaattcgacaaataatatggccgttttcggagggattatcgcggggttaattgcgggatacacgtataatcgctttaaggatacgaagctgcccgaatatctcgggtttttcagcgggcgcaggctcgttccgattgtaacggcgctgattaccattattttggcgggtatcttcggatttgtgtggccgccgattcagtcggtgattacgtccttcggggaatggatgatcgggcttggcgggatcggcgcggggatttacgggatttttaatcggcttttgattccattcggtcttcatcatgtgttgaataatattttttggttccagtttggcgattttcacggaaaaacgggagatctggcccgcttctttgcgaaggatccgacggcggggacttatatgacgggattcttcccgattatgatgttcgggcttccggccgcttgtctggcaatgattgccgcggctaagccaagtaagcgcaaagcgacggccggaatgatgatcggtctcgcgctgacggcatttattaccggaattacagagccgattgaatttgcatttatgtttttatcaccgcttttgtacggggttcatgctatattaaccgggttctctttatttatcgtgaatgttctcggaatcaggtcaggtttttcattctcggcgggggcgatcgattatctcctcagctacggcattgccgaaaaaccgcttttgctgctcgttgtcgggctttgttatgcggtgatctattttgccgtcttttatatgctcatcaaaacgttaaacttgaaaacgccgggacgggaagatgatgaggaagaggaagaagtgcttagtgaagatacggccggttccgtcgaagaacatgccatgctcaaggggctcggcggcaggcaaaatctcgaaacgattgatcactgtgcgacccgcctcaggctgaccgtgcaggatacgtctctcattaatgaggcggcgcttaaaaaagcgggagcaaaaggggttatcaaaacggggaataaaacggcgcaggtcattatcgggccgaacgtcgaatttgtcgcggaagagctgagagaggccgtccgccttgacgatcagaagcagacttgaaaaatccggatcacctatgtgatccggattttttttgaacatatatcaagtttcacataatgtacaaaaaacaatgtttccttctatgttaagattcatgtagaacaagtatggagatgatgtaaggtgacatggattgcagttgtttcaattgttgtcataagcctgattaagattgtgctgacatgccttcctaccggagcggtggaatggatcctccgcaagtttgaaacccattcaaagctcagtgacgagtccgctgccgtttccctcgggggaaaacgtctggaaggcgaagacaaacgacgggtgattgatgattttaacgaagccgtgtttatcgaacggcattatatatacccagggatgaagagcgttatcttcatccgcaaaacggagccgatccgcttgtcattaagacgagaaaaggaaaaaaagatgtgacggtgtttgtatacagctacgaagatcatgtagatgtcgtcaagcagcagaaaaagaaagtaatcgcttattcagttctttccgacagcctgcaaaagcgcactatggccgccgccgggagctgaacataaaaaagccagatcatatcaatgatctggcttttgtttattctttttgatcgtctgctgaggaatcttcacgcttcgtataatcgaattgtgacggatccactttcttgaagcctttcggctgatagaaacgaagcagatcgccgttgatgatcttatcagacatttcaagctcagtcttgacgagagagtcttcttttttgtcgacttctgaatcatctaaaagtcttccggttttcgtatcgtaatacttgccggacactttcgtatagttcggcgagatgaagtctccgttacggaacggaatgacttctctgtgctctttcgataagatatcagaacctgacatgagataatctttcgtatcgacgccgagcagatgaagaacggtcggcgcgacatcgacttcaccggcaaatttatgattgcggccgcctttcacgccgggagcgtggataaagagcggcacccgctgaagctgggcattgtcgtattcagtgatctcatctttgccgagcactttcgccatcgctttattatggttttcggagatgccgtagtggtctccgtacatcacgataatcgacttatcgtacaggccgtcttttttcaggtcattaaagaactgttcaattgattcatccagatagttcgcggactggaagtaattattgacgactgaatcgccaaagtctcccgccgggaagtccgtgtcttctttatccattccgaacgggaagtggttggacagcgtaatgaacttcgtatagaacggctgcggcaggctctttaagagcggcatggattctttgaaatacggtttgtctttcatgccgtagtttttcgtattttcttcgctcatgtcataataagcggaatcgaaaaacttatcgatgccttccgatttgtacatttcgttacggttccagaaagtctgcgtatttccgtggaaagcggcagacgtgtactttttgccttttaagatcgcaggaacggactgcagcgtgttttgcgctttattgacgaaaaccgaaccttgcgaaagcgggtacagagagttctccatcataaattccgcatcagatgttttaccttgtcccgtttggtggaaaaagttatcaaagtagaatgtttgattatcgtgcgccagtttgtttaaaaacggcgtcacttccttgccgttaattttgtaatcaatgataaaggactgcagagactctaatgagacgtagatgacgttttttccttcggcttttccgaagtagacgttattcggcacgtcatagttggccttcatatagttttccacatccgttacatcgcttgaatcggcaagcgcgcgctggctgtttgatttcacattctgcacggcatcgtaaatcgtaaagttgtacgtgcccaagtatttcaccagatagtttcggtcaaatgagcgtgtcaaaagctcgggacggtcggattccgcgacggcgaggttgatcaggaacacaagcacggcggaagccaaaacgattctgaatgatttcttcgccggtttttcagccggttttttcatcttaagggccaaaataatcaaaatgacggtatccaggaagtagaaggcgtctgtccatctcattaacgagaacgcgctgtctccgagctggccgccgtttgtctttgcctgcatcatgaccgggatggtaatgaaatcattaaagaatctataatagacgatgtttgcaaaaagcaaaaaagacaataaaaaatgaatcacaataatggctgtctgctgtaatttcttcttgaaaagaagcccaaatccaagaaagaacaagctggagctcagcggattcacaaaaagcaatattttctggatcgtgttgtctatgccgaggttaaagtttaaaatataagcgacatatgttttcacccacaataacacgaccgctatcaagaagaaggcaagtcctctttcttttataaatgttttcattgttacactccttttttccgatcacggtttacacggaacgatagaaaaaacgaacgtaatcaatataccatgaaaccagcaaatagaaaaggtggaaaaggctcatcggaaaaagggcgaaaaacgctgtcgcagcggcggttgatctgttgaatgacagctttaaaaaacacaaatggcacaaactgggatgtgaatttccgtatgatcacacccgattctattgaagaaagaggtaaacagtgatggatattgcgcatatcgtggctgaagataaaatcaagcgcgccattaaggatggagagttcgccggcatcaatggaatgggaaagcccctgccgaaagacgatgccgcacatcttccggagtcgctcagaatgggctaccgcatattaaaaaacgccgggatcgccgaggatgagggcgcgctgaagaaagagctgatgacgctcgattatttgatcgccaagtgccgcaatgaacaggagcgggatcacctgcggaacaaacggacggaaaaacaagtcagactcgacaaactgacggaggagaaagccatgttctcaaaacccgcatcttctcattataaggagaaagtgtacagacggctgggccgcccgtaagccggctctttatatttttttctgaaaaggaatgtgctccataaggcgcgggtaggaaatgtggagcaggccgtttacgcactgcgcctgtaacaggtggggctcagccggttcaggaagctcaatcgtctcatcgatttccccgtaataccggttttggcagacgcccatgttcttcggaaaaaggggtgtgatgtttcctcttatatgcagccgtgttcttgacagcagcctcaatgtcaattcttcttcgtaaacgccgggcatttccacaatgacaaatgtgtgctgttcatcctgataaatatcataagtcagggtgtttttttgtaaggagaaaaaatcttcgggagatttccgtttcaggacattggtccaaaagtcgctgggcttgtgctcgttcgtaatctcaagccactttctcattttttcgatatccacttcggcagaacctccctatatttgatttgcgatcggcattgacgggttggcgatctgatcctgatcgctcacgtcagggtcaagatggcccgaattcaaacatccggcggccggcgaaaaatcccctaaagaaaagttcgcgccgacaaatttgctgttggcggtgtggctgttttgtacggtctgaccgatatcgacgtttccgttttgcgttgctccgtttacttttatattgacgacgttaatttggtaaggcattcataaaaacccctttaatctataatgggcggcaccggcgtaatatttgcggtatctgcggttccgatggctgtctggtcgttgacatcaggatcatttaacaagttctccatcatcgattctataggtgacgtatcgccgaatgaagagttcagtccttgtgatttgttatttgtggtgggactgttgtatgccgcttccccaatcgtaatagatccgttgccagaaatactgttaatcttcaaatagtacaggttgataacagtggatggcatctcttcacacctctttaacttagttgtacagtactgtatgctttttgtgctcctgttgtgaattccgcccggacatgttcccgaccaaacaagaagtcaaggcccggttccggcggggctttttttgtttcagggtctttcgcagtatatttgtgatgaaagcgctataaaaatagattgacgacatgtatatacatcattacaatagagtcataaacatgtatatacaagttttttgagacaaaatgaaaacggttacggaggggttggcatgggtgagtttaaccgggctgcgcggcagatcgctgaagctgtcggcggaatcgaaaatattgaggcggcgactcattgtgtgacgcgtttgcggtttgcattaatagatgaaaccaaggtaaaccaaaaaatgcttgatgcaatagacattgtcaaaggatcttttgcggtaaacgggcagtttcaagtcgtgatcgggcaggggacggtcaacaaagtatatgcggaattagtgaaggaaacggggatcggggaagcgtccaaggatgacgtgaagaaggcggcatcgcaaaaaatgaatcctttacagcgtgctatgaaaacgcttgcggacatctttattccgatcttgccggcgatcgtcacggccgggcttttaatgggtctgaacaatatcttaacggcggaaggcattttttacagcacgaaatcgattgttcaagtgtatccgcaatgggcggatcttgccaatatgattaatctgatcgcggggacggccttcgcttttctgccggctttaatcggctggtcggcagtgaagcggttcggaggaagcccgcttttgggcatcgtgctcgggctgatgctggtgcatcctgatctgttaaacgcatggggatacggggccgccgagcagagcggcgatattccggtgtggaacttgttcggccttgaggtgcagaaagtcgggtatcaaggtcaggtgctcccgattctgctggcgtcttatttacttgccaggcttgagctctttttgacgaaacggacgccggagggcattcagctgttggtcgtcgcgccggtgacgcttttggtcatcggttttctatcctttgttatcatcggtccgatcacctttgcgatcggtaacgcgctgacggcgggattgattgccgttttcggccaattctccgccatcggaggcctgctgtacggagggctgtattcggcgcttgtcatcacggggatgcatcatacgtttctcgcggtcgatcttcaattaatcggatcaaagctcggcggcacatttttatggccgatgctcgcattatcaaatatcgctcaaggatcggcggctctggccatgatgctcattacaaaagataaaaaacagcgggggctttcactgacggccggcatttccgcatatttgggcattaccgagccggcgattttcggcgtgaatctgcgttacaaatttccgtttgtgatcgccatgatcagctcggggattgcggggatgttcatctccgtcaaaggcgttctcgcaagctcggtcggagtcggcggcgtcccggggatcttctccattatgagccggtactggggtccgtttgcgatcggaatgctgatcgtgctgatactcccgtttgcgggaacatacgggtatgcgcggctgaaacggcaaaaatagaaaacctgcggggcgccttctaacaggctgtcccttttccctttccattcaaaacaatacaggcggtgaagaaaaatgaaaacagacagcacaccatggtggaaaaaggcagcggtatatcaaatttatccgaagagctttaatgatacgacgggaaacgggatcggtgatctgaacggtattatcgagaagcttgattatttgcagaagcttttgattgatgtcatttggcttacgccgatttacgattcgccgcagaatgacaacggttatgacattcgcgattactgcaccatttatgaagaatacggaacgatggaggattttgaacgccttctcgatgaagcgcacaaaagaggaataaaggtcgtcatggatcttgtcgtaaaccatacatcagtcgagcatcagtggttcaaagaagcggtttcgtcacccgacagtccgtatcgggatttttacatttggaaagacggcaaggaagacggccgggcgccgaacaactgggaatcaaaattcggcggttccgcttgggagctcgatccggcctcaggccagcactatctgcatttattcgatgtgtcgcaggccgatttgaactgggaaaatgaagagatgagaaaacaggtttacgacatgatgcatttttggttccgaaaagggatcgacggcttccggctggatgtgatcaacctcatttctaaagaccaatcgtttcctgatgccgaggatggtcgtgacgggcgcccttattatacggacgggccgcgcgtgcacgaatttcttcatgagatgaaccgggaagtgttttcgaaatatgacagcatgacggtcggtgaaatgtcctcgacaacggctgaccactgcatccggtacacaaaccctgaaaataaagaactcgatatgacctttaactttcatcatttaaaagtggattatccgaatggtgaaaaatgggcgctcgctccgtttgattttctgaagctgaaacggattttagcgttttggcagacggagatgcaaaacggcggaggctggaacgcattattctggtgcaaccatgaccagccgcgggccgtatccagatacggagacgatggcgtataccggacgaaatcagccaaaatgctggcggcggccattcatatgatgcagggcacgccttacatttatcaaggtgaggagatcggcatgggcaatccgaagttcgatgacatcggctcataccgcgatgtcgaatcactgaacatttacaaaaagatgaaggaagaaggcgtgtcagaaaaagacattatcgccattttaaaagagaaatcaagagacaatgcaagaacccccgttcaatggaacagcgggccgaacggcggcttcacgacgggaacgccttggattccggcggcggatgattatcgggacattaacgcggaagcggctttgcgggacccggattcaattttctaccattatcagaagctcatcaagctcagaaaggaatatgacatcgtgactgaaggaacgtttgagctgcttgctgaagatgatccggcggttctggcgtacgtcagacacggcaaggatgaaaaacttctgtgcatcaacaacttctacgggaaagaagcggactttacggttccgcttaaagacacggacggctggcggtttacggtgctgctgacgaatgatgaaccgagggaagggcggccggaacgattgacgctccgtccgtatgaatcgatcgtttatcatctgacaaaagcgtgatacactaatctgggtggtcatgaatgaaagtgaataaatatatcacaatctataaagatatggtgcggcagattgaaagcggccagcggaaggctgaagacgttcttccgtctgaaaatgatttatgcgatcaatacggcacatcacgagaaaccgtccgtaaagcgctcaatatgctggcgcaaaacggctacatccagaaaatcaaaggcaaaggctccgtcatattagacagagaaaaaatgcgctttcccgtctcaggcctgatcagcttcaaagagctttcggaaacgctcggaaaagagacgcgaacggaggttcaccgtctcgggctgatcctgcctccctcagaagccgcaaaagagcttggtacagtggcggatgaaaaggtgtgggaagtcgtcagatcaagacggattgacggagaacatattattttggacaaggattactttgtgaaaaaacatgtgcctctattaacgaaggcgatttgtgaagattcgatctatgagtatctcgaaggagagctcggcctgtccatcagctacgcgcaaaaggaaattgtcgtggagccggcgggggaggaagaccggaagtatttggatctcggcgggttcagccatatggcggtcgtgaaaaaccgcgtctttttggaggataccagcctctttcagtacacggaaagccggcacaggctcgataaattccgtttcgtcgactttgcgagaagagaaaaataaaaacggactgccgcggcagcccgtttttttgtcagtatcaaaatgaatactatccaacaaaaatgtgcgtactggtactttcaaaaataatggctacaatagtacataacgagataaaaaggagagatcatgaatgtcagataaaaaacagcagatcatcgaagcgtatcaattcagacacgctacaaaggaatttgatcctgagaaaaaaatttcagaaagcgattttgaattcattttagaaacgggaagattatccccaagctcactcggtttggagccttggaaatttgtcgtcgttcaaaatccggagcttcgtgaaaaactccgcgagttcacatggggggcgcaaaagcagctgccgaccgcaagccatttcgtacttctgcttgcccggacggcaaaggatatccgttttgacgccgactatgtcaaaaaccacttgcgggaagtcaaaaaaatgccggaagatatgtatgaaggctatatcagcaaaacggaagacttccagaaaaatgatttcaatctgcttgaatcagatcgcgcgctgtttgactgggcatccaaacagacttacatcgccctcggcaatatgatgacagccgctgcgcagatcggcatcgattcctgccctgttgaaggcttcaactacaaagagatccaccggattcttgaagaagaagggcttctggaaaacggaagtttcgacatctctgtcatggccgcattcggctaccgtgtcagagaaccgcgcccgaaaacaagatctgcctcaaaagacgttgtaaagtgggtataagataaaaaaagctgccgggcgtgtcccggcagcttttaatgtttatttggttttgctaaaaaacaggcggtgatccaggacgtaacgggaatgatgatgccgatcccgattccggcgcaaagaatggtgacggcttccgcactgaatacttttgagttcactattttttcagctgagtatgataagtctttaaaccagataattaaagccaaatagctgccgaaaaaagcaaagaataacgtattcgtattcgttcctaaaatatctctcccgatgcttaatccgaatgtgtacagttcttttctgctcatggacggattatgactgtaaatttcccgcatgggtgaagtaatggaaatcgcgacatcagtaatcgccccaatcgtgcccatgatgatcatagctgcggtaaccttcacaaaatccaccccgacaaacagtgtgaatatgccgatatcccccaattcttcttcaccgaatccctgaatcgaagtatgttttgttacggacataataaaaaacagcagcaatgcaatggtcagcatcgcagaaataaaggcggttacggttttgacgtttcctccattaatataaaaaagagtaatgctgcaaatcacggcggaagagagcaatgttaaaacaatcggattgatatgcggatctgtcatgaaaataatggtgagaaagagaaccccgaaatttaagaataacgcaataaaagacctcgctcctttttttccgccgataatgaccattaatagaaataaaatcgccgcgagaattacgatgacattcatgagcttgccttcttttgtttaataaaaaagacagaagcatacagactggcgggtatggttaatacaattccgatccccccggccaatgctctggctatttccaaggaaatgttcatagaaagagtgaatcctatcggggaatcatttttcaaatacaaaagcatcatcggaatagagccgcttatataagcaaaaaacagaatattggtcatcgctcccatgatgtcttttccgatctccatcccggaacgtctgagagcttgtaatgagatacccttgttttcttcatataatccgaagacagatgacgtcatggtaatggctacatccatgaccgctcccagtgatccgataaataccccggccataaacaccgtgtgataagggcgggttaaatactgcatttcctcatatctgagacctttctctccggttgccagcatcaccagatacgtaatcagcagggaaacgaaagtgcctgcgagcgtcgcggctatggcggcatatgttttcgcgtgaaaaccgctgacaagcagcaatgagatgaccgtaaagatgagaatacagataccgcagataaaaattaaccctatattaggatgcttcctgtacaaatctaatgcaaacgacagtaaaacggcgttaaacatcaggctgacgatcgaaaagaagccttgtttttttccgacgataagcaaggtgaagatgaaaacccaagcgatcagcaaaagctgtttatcccgttttttatctataatgcttcccgatatatctttgtttgatggtttccctttatcaatagaaacgaatacttcatcgccaatcgaatatttctgatcattcgctccggataaagaatactgattggacaaatgaatgagctgccctttctgactgccgttttcaagtctggcagtgatcgtctgattgaaaatcttatctttgtttttatgcatgtcctgtacgtttgcctggtgttccaaagttgttttcgtcactctggcaatcggccgctcataaaaagaagcgttgtgagtgacaaaaatgatcgagctgataaaacaaagcgctgttatcacgtaaaacagctttttcttgtaagacatgcggtttcgtttgtttcctgtaatcttcaaaaaaagtcctccaaacaggcggcgccgtgtaaaagagaggctccgccgtgaagtgttaaacgatgcggatgcagtctttcgcgaataacgttcatattttatcactcggccgtacggctgtcgactcagagggggaccggcagaaaaagctctcctgatatcagatcaggagagctcttgggatgaaccgcccgataaaagcggtctttttatgcttcgttcactttttttgcttttcttctttggtacagatacagtgccgttccgagcgcgctgatgagtaacccggcaagaaggatggaatacatcgttgtggctgtatcaggaagcaggccgcccggcgatactccgtcctgcgcagggccggatgacggtttttgtccgcttggctgctttccggagccgtgatctccgcttgtcggcggcgcgctcttcgtgtttgcgtttaatatggtgtattcactgaaatgatttgtatagcccgtgacgagatcgtgtgaaaccgaaccgttgtctgtttttgtatagacgttctttttccggtctacatgataaatgccgggctgtttcgcctttttcatattctcaatgcgcagggtgagctttaccggcgctttgaatgttttgatgtctttgtttttctgcttcattgtaaagtcgtatacatttgaaagcgccccgctaacttttcctttcggcgccacgccgaatcgtgtatcagctgaagcggcgtttgccatcggcattttcatgctgaacttgtcatgcaggatcgtaagggaagaatccgatgttctgtcctttaacaggccgatttgttttttggtcacgctgagatcaatcggctttttggcgccgtcattcttatcgtaatacacgatcggcgtgttggcgtttttggcatagacggcaaatgcgctgtcatcttcaagcgtccacgaaccgtttttttgttttgtcggcaggtacacttcctgcgcgcggccgtcaactttcggttccaccgcttttcccgctttttcaagctgctcaacgaagacctcatagtcggcaaagccaaggtcttctttatgggatgcttcgttaaagacggaatatccgtctccgccttcaccgacaaagttactggtggcgactctgtatgtcttcttatcagaaatcggctttacactgccgtcatcctgtacggccgaagcttgaagaacacggtgtcccggctttttattcagtgtaaacgtgtatgttaaaccggcaacttgagggaaggcgccgccttgagcctcaattccgcttaatccttgttccagggcttgtttgatctgttttccggttaaatccgcgacgtaaagcgtgttgccgaacggcattacattcagcacgtcgccgagtgtgatgtctcctttatcaatgcccgcgcggatgccgcccccgtttgtgatcgcgatttgggcgccggccgcttccttcgctttttgcagcatgccgtccgcgatgaagtttccgagattggtttctttggagcggacatgctcgcgccggccgtcaagtgcgaccttcgttgaaccgactttttcatttttaactgagacgagctcttttttaaacggatcaagctcttttttcagatccgggtcttctttcgtctgctcattcaccggcagcgcttgaagagaggattgttccggcaggacgacgccgtttttgtcaaatgcgacatcgacacggcctaaatattcgccgtattcttttgcctgggcgacgatggtcggctcttcgtttttgacaatttccattttatctacaagcgtatgcgtatgtccgccgacgattaagtcgatgccttttacttttttggcgagatcgagatcacgctgatgtccgatatgggtcagggcgataattttattgacatgttccttgttctgtatttcttttaccgtatcttgtgcggattggaaggcatcatgaaagacaatgctttttcccgggcttgatgtgacggacgtatcttctgtcgtcaagccgaatacggcgactttttctccgtttacatcaagcagaatatatggatagatgcctgcttttttctttttccctgccgtaaatgtgtctgcttttttcatgaatggtctgagttttgactctttggacacatcgacatttgagctgacgagcggaaagtcaggtgcttgaaaattgtatttcccggacgggtcagacgcgctcccgttaccgctcaagaagctggcgagagcacccggacctttatcaaactcatgatttccgaaggtcattgcgtcgtagcccatgctgttcatcaattttaaatcagccagcccctgccactttgtgaaatagagatcgcctgagaaaacgtctcccgcatccagcaaaatgctgcggtcggtttcgcttctgatttctttgattttcgtcatccgcctcgccgcgttatcaaggtgggcgtgcgtgtcatttgtatgcataacggtgagtttccatgcgtcatctttcggcggatctgtgcccggttcatcatctttgaattggagcttgtactgtccgtagcccgcgttttgtgattcaccgatataggcgacgtcatctgcgcggtcggcaaacggctttgcggccaaggaagattcaaatgtcagatttgtccctttgaccggaaggatggaccagttatgatcagcctgcggattaatcgttttctgctggatgatgtaatccattaagacctgcctgttctcatcggcagaagagtatacgattttgtcattgcttaagtgagggaatcctccgccgcctgaagcgcggtaattatttgtgacgatcagaaattcctgcttggcgctgacgggctttccttgataagaaaggttgacgatccggcttgcatcgggatgaatgactgttccgttttcgttgtatttcgccggttttgtgacatcgacctgataggtgacaccgtcaatgacatcaaaattgtatgagcggtaggcgtcatttaaaagcgcttggctgccgccttttgcctgatcgatctgattaaattgccccgcggacatttcgagccagtctttcacttcgcttccgttcagcttgacgatctgaaccgtgttgtcatacaggtacaaatcgccgatgtttttgatggcgaggtcgccagcggaaatgtttgtatagtagtttgagccgttccgcccgccggctttaaacggggcgcccgccgagaggataggcagatctttgtactccgtatccttcatcttattttcggcgtaccatttttgcgcatccgttacgatttgaatggacggatcatctttgacttgggcgaagaaactgttgatatcggcttttgtctggccgacgggttctctgatgtatttcaaagtgccttcgtgcgcttttttgacggtattgacgacggtttcgttttccgaattcacattgccggcaatcggctcgatgctgccttttgcatcttccacatgccacgcgctgtctgttttttcaagccggaggtcgatgacgcccgcatatttgccccagctgcttgacataacaacggggatgccgttaatcgtgcctttatcgacgtcgaattgagcagcgcctttgtattcggcatcagggaaaagcccgtgctgatggcccgatacgatcgcgtcaattccgccgactttcgttgccaggtcaaaaacggcgttttccgctccggaagactgcgcttttttttcgatgccgctgtgggcgagggcgatgacgatatcggctccttcagctttcattttcggaacggttttctttgcggattccacaatgtcctcgacctgaacgcggccttcgagatttttcttatcccacgtcatgatctggggaggaacaaagccgatatagccgacttttagctgatgcttgccgccgttttcatccgtgacggttttgtcttttatgacataaggcgtataacggttttcgccgcttactgttttcacattggcgttaacgatcggataatcagcgcctttgattgtcccgtccaggaattcaagcccgtaattaaattcatgattgccgagtgttcctgcgtcataatgcagactgttcatcacttcaatgatcggatgggtttttgcgcctgaaatgatatcatttttctcatattttacggcgtattctccgaggggattcccctgaatcaggtctccgttatcgacaagcaccgtattcgggttttcgcgcctgtgcttctcaataagctgagccgttcgggccagcccgaattccgttgtcggtttgtcgctgtagtaatcgtagtccatcatgttagcgtgaacgtcagttgtggctaaaatgctgagattcacactggaggatttgttttcttctgctttaatgggtgatgttgggaggatcagactaagtatcataactaggggcagcagaatacggagtgtcatattgacgctgcatcgtcttttctgtattctcacctgttctccacctttcaacaaattttgtcatgcagtaccattgtaagaatattttgtgaaagtttatatagatttcatgatgattcttgtgaaaagataaaaaatgaggataatgacctatgtaaaacaggcgggcggtaaacgcgttacctatgtttgatgttagtgtggctggggtacatggatttatgtagacttcatcaagcaggaggtagtaactatgggtaaaaaaattgcagttgtattaacggattactttgaggatgtcgagtatactgaacctgcgaaagcttttaaagatgcgggtcatgaattaaccgtaattgaacaggaaaaaggaaaaacagtcaaaggaaaacaaggggaagcggaagtgaaagtggacgcgtccatcgatgatgtgaatccgaaagactttgacgcattgctgatcccgggcggattctcacctgacatgctgcgtgcggatgaccgtttcgtccaatttgccaaagcgtttatggatgataaaaaaccggtgttcgctatctgccacggccctcagcttctcatcaacgcgaaagcattggacgggcgcaaagcgacaggatttacttcaatccgaatcgatatggaaaacgcgggcgcgaatgtggtggatgaagaagtcgtcgtctgccagaaccagctggtcacaagccgcacaccggatgacattccggcattcaaccgcgaatcattaaaactgcttgcgtaatataaaagcggagcgccgtatcaggcgttccgctttttttgtgaagattcccggatgaccagctcaggcgccagaataatgcgttgttttttgtgctgggaattggtgattttatgatgcagcaattgagccgcttcttttcccgactgccgcggaaaggaagaaacggttgtaagcggaggataagaaatttcagcttccggcacgttatcaaagccgacaatgtcaatatcttcgcccggaacgagcccggcttttctgatcccttgcatgacgccgaatgcgaccaaatcactgaagcagaaaatcgcggtcgggcgctcagaccggcggaggagctccgtcacggcgtcacagcctgcttcgcgggtcggcgcgctgtcaatgacatattcatttttcacttccagatccgcttcacggagtgcttttttaaaccctttcatacgcttcgtccatgttgatgagtgcttcacgccgcccagaaacgcaatctcctgatggcctttctcaatgaaatgacgcactgccttataggtgccttcctcataatcggctccgacaaaatcacagttggcatcggcaatctccctgacggcgagcacgaccggaatgtcaagctgctcaaggcgggaaagggtttcctcagccgtccctgaaaccggacacaaaatcaatccgccgaccctgtgctccagcatggtcgagatcagctgctcctgcttggcgacggaatcaaatgtcgtgcctaacagcaccgttaatccgacttcctcaagcgtattctgaacgccgatcagaaactctgagaaaaacgtattggaaatgtcagtgataatcaatcctaccgttgtggacgtctgtgatcgtaaattcgcggcgacccgatcatatacgtaccccagctcccgcatggattgcagcactttctcacgggtcgcttcggaaattcggggattattgcggacaattaatgaagcggtggatgttgagacgccggcatgttcggcgacctgctgcaatgtcacccggcgttttttttgctgtttcatacgtcgcattcctcacttggtttttattcgttacatccattataagcgttttggcgcatgagaagaaagagagaggagggggaaaaagataaagcgccggaagacggattgtccttcggcgcttctgtcacaataggttattcaaacatttgctctttaatatactgaaccggcatttcacggcctgtccaatattcaaacgccatggcgccctgccaaagcatcatgccgagaccgttaatggtcttgcagccggctgcttgagcttgttcaagcaatttcgacgtaacggggttgtaaacgacgtctgtcacaatcaaatccggacggagcatggatgtatcttcaataacactcaagccttcaagcggtttcatgccgacacctgttccgtttgtgaaaatatcgcttgaagcgatttcagcacgcagcgcatcttgatcttcgagcgggaagactttcgctttacaagaagatcccttcatttcttcattgatgatgcggacattttcttccgctttttcgaaaaacgcgtcattgcgggcgaaaatagagatttctccgaggccttccaatgcggattgaatcgctatcggagtggcggccccgccggaaccgaccagcgtcatttttttccctgtgatatcgatgccgtgttcttttaagttgcggacgtatcccataccgtcagtggagtgtccgatcagtctgccgttttcattaacgactgtatttaccgcgccggtaaatttcgctgaatccgcgagttcatcgagataagggagaatgttcatcttgttcggcatcgagacattgaagcctctgacgtttaaggcgcgcattcccgttaccacatcttccagctgttcattgccgacttcaaacgcgaggtaagcgtagttcaatcctaattttttaaacgccaggttgtgcatcgccggagataaagagtgtccgatcggtgtcgcgaataatccgataagctgagtttttccgttaatccgtcctaattctttcttcatgatgtattcctccgttagtccattcatttgtttttcctcccgctttgagggcaaaaaacgctgattacatatgtttatttaaaatgctgagtacgctgcgcaattcctcaacgggaatctgcccgggcgctgatgcttctttgcccgctccgaacgtgcacgctgagccgaagacttcgccggccagccggctgatcaggcctgttcccgccattgacatcgtgatgatcggccggtctgcgtattgtgttttcatcgtgtgagtggcatccaataagacgaaaacatcttcagtgctttgcggcatcaccgcgattttcggaatgtgcgcgccgtacgcctgcatgttccggagccgggaaatgatttcttcttttttcggtgtctgatgaaaatcatgattggacatgacgacatatacgccgttgtcttcagcggttttcacaattgatttgacttccgcttctcccgtaaacagctcaacgtctgcaaggtcaatatgttttgtttcgatggcggttttaagcaattcaatgtaaaagcggtcatcaataactttatttccgccttctttatgggttctgaatgtgaaaagcagcggtgttgctcctgcggctttccgcagcttttcaagcatgccttttacggcgtccaggctgtcaacatgctcgtatacatccgcccgccactcaatgatatccgggcgaagcctgttgacggcttcaatttcttcgagcagttctttctctccggccgccatcagcggcacaatgatcttcggaagcccttcaccgatgaccgtgtttctgattgtgatagattgcatgataaatcctctcccttaaaaaatagtcaggctttcatcacttgcttaaagcggattccgataaacaatgcgaggagggcgctgacggccgcaattccgatatcaagcagaaaaacaggcgtcaggccggcggctttggatatcgctcccgttacaagcggaatgacaataaaagataagcttgatgctatattaacaaaagatgtgattgtacctttatttttagggaataaaacagccataaccgtcatcgccaattgcagaatgcccgcagttgaaagtccgatgacaaaggagctgatgaccgatacggccggctgctgaatgaaaatcagagcaagcagcgcgattgccgcgatcacagggtacagcaccattaccgtaatcggctgaatcactctgtttaacagcacagccagcaataacacggacacaagcgccccgatgctgtaatagctcaacaatttgacggcctgcacctcaggcatgcccaaaacggattgcccgaacttaggaagccatacttgaacgagcataaacagcgccgttgatgaaaagcctaacagaatgatcgcaacgccttcgcgccatatcgacggctgtgatgtgaacgcgtcatcagacggagaggcttccgtccggccgccgtcttctttttgcttatgattcggaaacggaactttcaacagaaaaaagccgttcaggaagaaaataatgcccggtacgaaaaacgtccagccgtaaaacaaatgcctgtccgcaataaacgcgataaaaaacggaagcaccgtcgcgccgattgatacaaacgctttgattaacacggttgcagagcttgcgtttttcggaaatccttcaataagcgccggatatgtcccggaatccaaaaaggaattggcgatcccggcgaaaatggcgaagataaacgcggccgtatagtttgtcgaaagcggaatcccgattaggaaaatcagatacagaaaggcgcccgacacgataaacggccgtctcccgaatgtatccgaaagcttcccggcaaacagaagcgaaatcagcttcccgatcccgatggcggagaccaaatagctgacaccggctgcggaagtatgaagctgttttgataatgcctccatattggatgcgataataatattgatcatgcccagcaggaaatagttaatataaagacccgctgccattttggtgtatatgtttttcatgatgacatcccctaatgcggttaataaagaattaaattatttttttaattgataaaagcacagcaccatacccctttattgaaccactgcctttctttgaaaactgtttgatacaacggttgcatagacaaacttgaataacgctgatatcacaatgagtatatcgttctactaaacaaaaaaagataagcggcccgctcatttagtatatcgttctaccaagttcacagttactatactccttctttttatatgtgtcaaaccgatgaacttttattttttacttttttaaatcaaaaaagacccgccgtttttcggcaggtctgacatgggtttatttcctgagagaggcgagctcctcggcaatggcctgcatttcactcgggctgaatgatgcttttttcatgaccatttgatgaaggtatgtaagatcttctattttttcatcactgaaatcttccgctctgatgacgccgacattgagcatgttgagcttttgcgaaatgtcttcaatcattttatttaacgtttctgtttgttggctcggcaaattcatgcatcctttcatgatcgttttcgtcccctttattctaacagaattcatttagaataaaagcttatttccacagccgcagaaaaattgctaagatgttgataaggtttttgatcctcaaaatgcggggaaagaatagggaggttatcgatatgatacatgtgctgtttgtctgtctgggaaatatttgccggtcgcctatggcagaggcggtattttctgatatggtgaagaaaaacgggctgaacgggcagattaacattgattcagcgggaatcggcgcctggcatgcgggaaatccgccgcatgaagggacaaaggagatcctgaaggagaaagggatcagcgcaagcggcatcacggcgaggcaggtcgggtgagtctgatctgaccgattttgattacgtcattgcgatggatgcagaaaatatcggacatctgcgcagcatggccggttataaaaaagcggcgccgcgtattgcaaggctgcttgattatgtaccggagtcagaccttgccgacgtgcccgatccgtattataccggaaatttcagcgaggtgtacgctttggtcgagtccgggtgccgtcatttgctggagacaataaagaaagaccatcatttataaggggattgaccgatgaagcagacacgcatcatggcaaaagccattctgatcggcgctgccgccggcggagcactgtccttattacataagccgacgagagaggcatgtttccggaacatggacgcgtgcaggcggcgtgcggcattttaccgaaaacatcctgaagccctgaagcagcaggcttccgcaaaaatggatcaagtgaaaatcttcgccaataccgtatcggaagatctgagttttttaaacgggcagatcaccaagctgaagcagacgacaccgcaggtcattgacctgttaaaagaaacgaaggagcatttttcgaaaaacgatcattgaggtgggatgtcatgagttttataaaggagctgtttgcaaggttttctctgcatgaaggacaaagtaaatcggcggagctggcgtattttttcctgctgtcattgtttccgttaatgattttcatgctgacgctcaccgcctatcttcccatatcggcagaagacgtgctcggggcggtcgatcaatacgcgcccgacagcgccatgtccatggtgaaatccataacggagcaaacgctgaacaagcgcagcggcgggcttttgtcattcgggattatcgccgtcatctggtcggcttcgaatggtatgaacgcgattgtcagagcatttaaccatgcctacgaagtcgaggaaaaccgctcatttatcatcattcgcctgacctcaatttttttaaccattgcgatggtggttacgattttaatcgcactgcttctgccggtgttcggcagagaaatcggaatgctggccgcggatttcatcggcgcctcggacctgtttttgcaggtgtggtcggttgtccgctggggtatcagtccgcttatccttttaatcgtgtttaccgcgctttacatattcgcgccgaataaaaagctttccctccgttttgtcctgccgggagctgtattcgcggcagccggctggattatcgtcagtatgctgttctcattttacgtcggcacctttgccaactacagcgccacatacgggagcatcgggggaattatcgtcctgatgatctggttttaccttacgggaaccttgttgattttaggaggagaaatcaacgcgcttttacataaacgtaaaaagcttcctgatgaaaatccgtaccgcgggagcaagctatagaggaacggatgacgttcaagctgaaaaacggagggaatcggctatgaccaagcatacgaaaaaaggcggaagccataataaacaaaactcaaaaaacggcccgaagaataaaacaagcggaagcgccaacgggcagaacggataccactagaaagaagccgcctggctcagatcaggcggcttttttatgtggccggaaaagaatgggattcggaagcggggctgtgctttgttttcccgaagacgagcgcaagccaaatacagaccagaatcaccgtaataaagtaaaacaagttggcgctttcaaaccgctgcatataccagccgcccgccaccgggccgatcatgcttccgaggctgaaggaaatgccgcagagcaggttgcccgccggcagcagatgggacggcagcaggtcgctcatatagctgatgccgagggaaaacatactgccgaccgccatccccgccgtgaaaaagcagcagccgatgacagaaggcgacggaaacagtccggccgtcaaaaagcaaagggcacccgttaataagatgacgagcaggacacgttttctcccgaatcgatcgcttaataaaccgagagggaactggaatacaatacttccgatggcaaaagcgggcaatatcagcgcgacggcatccacggatatgcctaaacgaagggcgtacacgggaaagcttccgttcagcgccgtttctaaaaaaccgtacccgaaagccgggagaaaagcgacccagccgaaaagaagggcgcggtaaaaccgttttgcgctgttgtccccggatgtttcatccggaccttgcgccgggtactcgttacgtaaggcaaacacaaacagccaggcacaaagactgatacagccggatacgataaacggaagggacggacttgttttcacaagagggaccatgaacgggccgacagcgaatccaagcccgaaggacagtccgtacagcgaaatgtttcttcctctgtttcggggcgttgacttggaagtcacccacgtttgggttgaaaaatgcagcatatgatccccgattccgataagcagccgaagaaaaaaccataaccatatggattgaagccaaataaaactgaataagctgatgataacaagaaatccgcccatgaccatcagaggtttgaatccgagcttgcgcagcggggcctccataaacggcgacgccagaagcacgccgatataaaggccggttgcgtgaagtccgtttatggctgcggattctccgttcgtttcaaaaatgacggagatcaccggcagaagcatgccttgggaaaatccggagatggaaacaagcagaaccaaaataaagaagtacagtcgtgacatcgcgtatttctccttcttcagtatctttcttgatcgtacacggatttgccgcgtccggcaacctgaaaatgccaattcgggctgccgaggaagtgtaattgaaggagtttttgagaaggatataaaaagacttattcgaaaaaaggagccaggcagatatgaatcggatttttttctttacggctgcggcgggagtgccgctttcagtcatcggcggcctgatgcactggccgtcagcggttttgtttattatttattgcttgacgattattgcgcttgcaagttatatggggagagcgactgaatctcttgccattatcgcgggaccgcggatcggcggtctgctgaatgccacgttcggcaatgcggtagagctgattatatcgattttcgccttaaaagaagggctgacgggcatcgtgcttgcttcactgaccggttcggtgctcggcaatcttttgctcgtcgcgggattgtcattttttatcggcggtttgaaatacaagcggcaggaattcaatattcatgatgcccggcataattcaggcctgctgatttttgccattatcgtagcttttgtcattcccgaagtgttttccatagatatgggggaaaaaaacaagcttgatttgagtgtcggcatcagcatcatcatgatccttttgtacgtggcagctctttatttcaagctcgtcactcaccgcggtgtttatcagccgaatcagccggaggcaaaggaagaagaggagcagccagagtggtcggggaaaagagcgacagccgtcttatttatttcaactattattgtcgcctacatatctgaaaaccttgtccatacgtttcatgcggtggctgaacagttcggctggagcgagctgtttatcggggtgattatcgtcgcaattgtcggaaatgccgcagagcatgcgtcggcgattattatggcgtacaaagacaagatggatgtcgccgttgaaatcgcggtaggttcgactttgcagatcgccatgtttgtagccccggttcttgtgatctgttctatcttttttccggtcaatatgccgcttgtattcacattgcccgagcttgtggcgatgatatcatccgtccttttgatgacgatgatttcaaatgacggcgattcgaactggtttgaaggggctacgctccttgccgcttatgtcatcatggcgatcggttttttcctgctttaacctgtaaaaaatgcggataacaacgattgcggaggaaaagactaaaggaaaatgctatagaaagagtgatatgatgagaaagctgtttcatgccacactgattctgctgttatcctttagttttttcgcaatgccgtctgccggtgcaaagaaaccgtttaaggttcccaactctgttgtaagcatttcaaaggaaaatacgtatccgaatgcttcacaggaccagccgatgcttcagccgagcaaactggcaaaggaattgttagatacatccgagatcaacatcgaaaatccgcatctgataaaaatgctgaatgaatcctcggtttccggttcaccgcttgccatcggctaccgggcgacaatatttctcgggaaatgggcgctcggctatcaatcgaacgaaacggtcgccaactgggaatataaaaaaatcaatacgaacagagcggataaccggggcggacagcaaaccgcggttatctcatacgcccaagaacagcagtacaaaattaaaggcgggctcacagcgaaggtgccgaacgcagaagacgtaaaaagcatgatgatgcaaaaagcgatgaagaaaacaaaactgccgctcgcgtttgaaacggttatcggcgcaggcacaaaacgcgatcaaacctacaaaatttctccgcagcggctcggctacctgcacgcctacgctccggccgttaatgaaaaaggaaaagtaacatacggtgaagtgtatttggtgctgaaaggcagcaagcggaaacttgtcgtcaaaaatgtgacttcgcaaggaatcggggcttggattccggtgcaggatcacgtcacattcggttttcaaatgacagcgcagccgagataaataaaaaaagctgattccggttcgggaatcagcttttttgtgtgtgatacatttcctcaagcaattgcacattgttgttgtacagctcccgggcaagaacgcgtctcaccgcaaggcttgccgagaagtattctttatcttgaaccatgcctttgacggtaaattctatgcctctcgtcaatttgttcaggctcatgattccatgcacttgaaacggctccgtcgcattgagaaattcatcccgcttcagtgaatcgcgaagctcatcattgagcatgtcgcaggctttttctaagacggcatatacccgctcgggatcttctttataactgatcacgacggactcggtaatccgcataaaatcaatattatagttttgaagctgtctgacctcaccgtttgaaatggtaagcagcttgccggtccactcacggatctggagggaacggagcccgatttcttcgactgtgccgttgaacagattgttaatcgtcacgtaatcgcctttatgaagctggcgttcgtatatcaaaaagacaccggccaatatgtccttgattaacgactgggcgccgaaaccgatgacgataccggcaacacccgccccggctaaaattcggccgaaatcatgaacgaataacgaaatgacgtaaaagataaaaccgatcgtcgccgtatactgggtgatggatcggacgaggctttcaatcgttttccctttccgttcctccaagaaatctatgcgtttaaataacacctggacaaagcggttgatcagaaaaacaccggcgtaaagcacgagagcgacgatgatgatctcaaccactttgcttttcaaaatatccgtaattgtcgtttccatcttctgttaacctctggcttttcgtaatgaaaaatccgtgtcctgataataactgtttttgacaaggacgttcggtccgaggcaccggacgtttgtgcagcggcagttcagctctttgctcagcttcgtctgtctccacttgtcatatgcatcgggaaggctgtctgttttaatattgccgagcggcggtgtatcgccgaaatccgtgacaatgatatttccgtcaaaaatgttgacattcaggcgggagcggccgtcagggtcgtttcgcaccgtaacgtttttcgcttcccgcaggcggcggaggagcttctggtcttcttcatcagggctgcatgcgtaaaacgggagcgtgccgaacagcatccatgtctcttcatcgcgaatgtcgagcagatgatgaatggcctgtctcatgtccttcaggctgagtgattcaagcgcgctggcgaaatcactcggatacatcggatggacttcgtgccgctggcatttcatttcttccgtaatctgccggtgaatatgttcaatatgcggcagcgtccgcttgttcagcatcgtttccgctgaaaccattacgcctgcttcgaccagcgtgcggctgttttcaatcattttatcaaaatagcgcgcccgctgttcaaatgtcggtttcttctccatcatcgcaaatccgatgtcggcaaagtcctcgaccgttccccaattgtgggaaatgtgaagaacgtccaaataaggaataatccgttcgtagcgcccgatatcaagcgtcaggtttgaattgatctgtgtgcgcacgccgcgttcatgcgcatatttcaaaagcgggacgacgtattcctttaccgatttcagcgaaagcatcggttcgccgcccgtaatgctgatagagcgcaacagaggaatttcatcaagccgctttaataaaaggtcgatcggcagcgcatccgggtctttcggctggagcgtgtacccgacggcgcagtgctcgcatctcatattgcacaaagtcgtcgttgtgaattcaacgttcgtcagtttcatatctccatactggtcgacatccatgtacgcttcccaaggatcgtactccggtgtaatcggacgcagtgctgtgttttgtgtcatgactatctaactcctttataaatgggcatactaacgtctgccaactgttaattttagacctgatctgccaagatcgcaagtagcggaaccattgaaaaacgccaaaaaatacgctaccattataaaaaatgaatggagtggaagtatggggaatgcagtaaacagcaaagatcagcagctcgattacctgaagaacagactcgatatgtttatgaatgtcattgattcattagaccctgaatcaacggacgttgaagatatagaccggctcatcggcatgcttgatgatctggaagcaaaatacgaacgctttaaaaaggattgggaataacccccggcggatgccggggtttttctttttccataatgcggctgtataaaagggcagggcctactgcaaaataaggaaaaatgcagaaggagtgctggtcatgaaatggttttgttcaatttgctgcatggccgttttacttgcaggaggcatcaacagcgcagaagcggtgccgaatgaacggataaactggggatttaaacgcagcgtcaatcatcagccgccggatgccggcagacagctggacaatctggtcaaaaaatatgatgccttttatttgggcaatacgaaagaaaagaccatctatttaacgtttgataacggatatgaaaatgggtacaccccgaaagtgcttgatgtgttaaaaaaacatcacgtcacgggcactttttttgtcacgggtcattttgtgaaagagcagcctgatttgattaaacggatgtcaaaggaaggccatatcatcggcaatcattcttttcatcatcctgatctgacgacaaaaacgggcgatcagattcaagacgaactcgattccgtcacggaagctgtgtacaacattaccggaaagcgggacaacctgtatctccgtccgccgcgcggcgtattcagcgaatatgtcctcaaagaaacgaagcgtctcggctaccaaacggttttctggtccgtcgcatttgtcgactggaaggttaacgagcaaaaaggaaaacaatacgcctatgatcacatgataaagcaggcgcatcccggcgcgatctaccttcttcacaccgtttcaaaggacaattcagaagctctggacgatgccattaccgatttgaaaaaagaaggctacacgtttaaaagcattgatgacctgatgtttgagaaagaaatgaagctgccgcgcctgtagaaaacacctctcctggtaatggagaggtgttttgttatttgatacatttaatcaatgccgcccaatccaaatctccgcagccttgtgcgatcccgctttcaaaatggctcttcgccagttcggcaagagggagttttgcggaaacctgttctgcggcggcgagcgccagattggtatccttgagccctaaagacattttgaagccggccggctcaaatttctcctcagccatgatcgtgccgtaattttgatagacgggagagccaaagagtgcgttggcgatttctagaaattgtttttgttctaaaccgaacttatccatcattaagaatgattcagataacgcctccagcatagaaacgagcaagaaattgatgctgattttcgcggcatttgccgtttttgtttcttcacccgtgtcaaatacttgctgactcaggatgttaaacagcggttcggcctttttcttcgcttctgccggtccggctgtgatgatgcgaagctcggccttctcggcggcatcggggcggccgaggacgggagcggcaataaaggactgccctctgcccgaatgtgcggcggaaagctgttctgacagcgccgtactgatcgtgctcattgaaatatgaatgccgttttcagataacccggcaataatgccgcaagctccgaacgtcacgcctgttacagcttcatcgtctgacagcattgaaagcacaatgtccgcatgttcagctgcctggcggggcgtttcggcatattcggcccctttatccagcaggtcagccgctttttctttcgtccggttatatacagtcaggctgtatccggctttcatgatattttcggcgatggggcggcccatattgccgagtccgacgatggcgatcttcatttgacagtccctccaatgaaaagttttccaccattatacatgcaaaatggttattctgctgtgtacaggattgccactttcagttccggttctgaagaccatccggagtctgaggcggctgtccccttataaaatccggtaaatcgggttttgatgattgtttttgaacggggttttacagtgaatgtttttgatttgaatgtgacgtcctttatgttttctgataaatccggcgtgacagaaatggtttgttccccttttccgtaatgattgatataaagcgtgcagctcatgcccgctctttttcgttcaatcagatgactgcattcgctgcggtgcttcaaatattcgacagactctttttcgggcgcgaactgttttaaggaaaaagcggcatattcggtggcaggactgataccggaagcggcccccatactgagaaagatcagaaacagccccgccgagggaagcgtccgcctgaacgcggcggcacaccagattaacgccgcaaagtaaaggacgaccccgggaatgacggagatatgggctccgtcttcagaccaggaagaaaagccgagcgactcaaagatgtaatcagacaccgtacggccgttatacagcggggcaatggacatgacactgaaaagcaggaggacagaagaaatgattttatgagaaaggatggtaacggcgcacacctctttacgtttttttccagactatcatgttttctcaaaaaaaagaacagccggcagccgttcttacttgaaaatattaaaccagcctttgcgggcgaaccaaaacagcatggcggcgacaagaacggccatgacgcccaaaacgataaaatacccgtatttccaatgaagctcaggcatgttatcgaaattcatgccgtaaacccccgcgatgaacgtcagcgggataaaaatggtcgagacgatggttaatgtcatcataatggcgttcatccggtttgaattcagcgtcacatagctgtcccgcaaatctgacgtcatatcacggtttgactcgatcagctcggccagttttaacagatggtcataaatatcgctgaaatacgccttcgtttcacggctttcttttacatggtcaaggctcaaaatccggtacattaaatcgcgcatcggaatgatcgtccgtctcaggttcaaaagatcagtccgcaattcaaacacttcattcattaaagtgccgtaagatttatgtgttctgctgtcttcaatttcattcagccggtcttcaattttgtacagcacggggaaatattcatcgacaagctgatccataatcatataagtgatgtgccccggcccttttttggctaatcccggagaagcgaaaaaccgttctctcacccttgagacgccgggcgattcgtgcaaatggaagctgacgatgaaacggtcggactgaaagatgtccacctcttccatttccagtgtgtccgggttcaaggcgtggagcacataaaaacggtagccgtcataatggtcgattttcggccgctgcatatgctgaaagcaatcctcgatcgcaagcggatgaaagtgaaaataatcccgcagcagctcggtttcatgcatctcagcgccgaaaaaatcgatccagtaccatgcgatgtccggttgttctgtacgtgataggggatattatctaatatctcattatgtgttgtgattgcggttatatgtatcataaacaaccctccgcctgccattatatcatgcggcgttatgaagaaaagtatacgaattgccgcccgcccgcttcatgatatacttggacaaaaaggggtggagcatatgtggaaggaaacggtttcggtcacgccgccgtatcattttgataaagtccttgagaggctgtcgctcgatccgctgaatgcggtcgatcttcatgcaagatcaatcaaagtgccgctcagaacacgggacggcaaactgtccgtcactacggttcaagcggaaggcaccgccgcagacccggtcttcctcgtcagcggagaaacggaccgcgaggagatgattgaacggatcaaacacatttttcaatgggaacagccgcttcagcctgtgcttgatcatttctcaaaaacaaatctgtcggcgctttttgaggagcatgcgggaaccccgctcgtcttggaatatgacgtctacaactgtctcatgaaatgcatcatccaccagcagctcaacctgtctttcgcatttaccttaacggaacggttcgtccatgccttcggtgaacaaaaagacggcgtctggtgctatcccgagccgaaaacgatcgcggcgcttgattatcaggacttgcgggagctccagttcagcatgagaaaagcggaatatgcgattgacatttcacgcatgattgcagacggagcgctcaatctggcggaacttacccatttatcggatgaagacattatgaaaaagctgatcaccatcagaggcatcggcccgtggaccgtccaaaacgtcctcatgttcggccttggccgcccgaatctgtttcctttggcggatatcggcctgcaaaatgccatcaaacgccgcttcgcccttgaggataaaccgtcgaaagacgtgatgcttcaggtaagcagcgaatgggcgccgtatttaagctatgcgtccttatatttgtggagaagtattgaatgaaaaaccgctttgatcattttttggaaacttccagtgaaaaacatgaaggaaccgccggctgcatgttatactgaaaagatgtgatatttcaaatcagccgctttcccaggagaaaggctttatatagaaacggagagaaaaaaacgtgaatcaacatcaaaaaaaggcgcctgccgaattgaaaatcgggcagacatttccgctgaccatcaaacgtctcggcattaacggagagggcgtcggctattttaagaaaaaagttgtcttcgttcccggcgctctgcccggggaagaagtcgttgccgaagcgacaaatgtgcagccgaaattttcagaagcacgcgtcaaaaacatccgcaagccgtctgaacaccgcgtcacgccgccatgcccggtctacgaccagtgcggcggctgtcagcttcagcatctggcatacacccagcagcttcgcgaaaaacgcgacatcgtcattcagtctctggaacgtcatacgagattcaatgtcgaagaaatgaacattaaagatacgatcggaatggacaacccttggaattaccggaacaaaagccagttccaagtcggacgctcgcaaagcggcagcatcattgccggcttatacggacttgattcccataaaatcgtcccgattaaggaatgcattgtccagcatccggcgacaaacaaaacaacgggtatcgtccgccgtattttggaaaaacacaacgtatccgtttataacgaacggaccaaaaaaggcgatgtccgcaccatcgtgacgagagtcggttttgaaacaggcgaagtgcaggtcgtgcttgtcaccgcgaaagagacactgccgaataaagacgagatcgtcaaagccattcagaaccggctgccggaagtgaaatcgattattcaaaacgtcaatggcgcgcgcacatccgtcattttcggtgacaaaacaaaagcgctggcaggaagacatgccattcaagaagtgctcggtgacgtgtcatttgaactgagcgcccgcgccttcttccagctcaaccctgagcagacggtcaagctatatgacgaagtgaaacaagcggctcagctgacaggaaaagaaaaagtcgtagacgcgtattgcggcgtcggtacgatcggcatgtgggtttcaagcggcgcaaaagagatccgcggcatggacgtcattaaagaatcaattgatgatgcgaagaaaaacgccaaaaaacacggcatcaaaaacgcggcatatgtcacgggaacagccgaacactggctcccgaaatggacgaaagaaggcttccgtcccgacgtggtcatcgtcgacccgccgcgaacgggctgtgacagaacatttttagataccatcaaaaaagtaaaaccgaaacgcttcgtctacgtatcctgcaatccttccacactggcgaaagacttgcaggcgctgtcgaaagactatcgcgtcgaatatattcagcctgttgatatgtttccgcagacggcccatgtggaagctgtggcgaagcttgtgttgaaatcgtctaactaaaataaacaattcgtaatcagacctggatttcggtataaacatttccgatttccggttttttttatgcgcagcctttgccctggctgtttatcttccttcttttctcggagatctttaatttaaactgatgaaaagagttgaaaaaacgtgtggaaaagcgaggagaaaacagccaattttgacctcgtttgtataatgacgctgtggtttattgtgacattaatgggataatgtaaaataatttgatatcattggtttgagatgaagttgtaacattattcaactgtaaagtatttatcatgccaaagtaagtaggtctttaataaatgataaaaaggaggtgaaaccgaacgagagatattgagatttcaacaactgaacgaaggttctgaagtagaagctgtaaaaggcaagggtgctaactttcactaaatcacagcggcagttggcatatcaacaactgtcgataaaagatcaaatacactaaaaaagcatgtttggtcgttatatataatatgaaagcctaaacaggaaaaggaccccaactattcctcttgttctaaaaaaaggaataaatataaggcggaaacgcaagtgataacaactattacagtaatacctgcgatggttatatccttaataagtaattattgcgacaatcatgcttcatcatataatgatgttagattgacactaggctaaaaagtattgcagaaaaggaaatggataaagaaatgggtaaagtatataaaagaagttggtttcacacgttgttggcatttttagtatcacagctttattttaactttgtagaattaacgggatggggtcctaattatagagaaatgaatggattcccagcaaatatagctgaactggatttctttcaaacatatctttcattctatgataatccatggtttaatattgtcactgttttcttgggggttttcactgttatacaaatcattaaaggtataacaaagaatatccgaaatgaaagcaataacttctgatgccttatttaatgatgaaagaacatgaacactttctaattaatcttatgaatgaagactgcggcacttagtcagcagtctattttattggttttggatcaggattaccgaagcgtaaccttatacaaatatatataggtgattgtataaagatattaacatacggggtttaaaagccgatcaacccttagtacatatactgtatagagccaagccacttgcggcgttgattatttctagaccatgagtaaatccgaaaagatccagattgaagttcttgaattctgttaagttcgagtttattttcccatgccatcctctttactccatgtgattcacaagcggcaagttaaggctttttctttttacattcttttcagtactcagatatacccccagccccatttgcttaatcaacttatttcttgaaatttgttttatggtaatagggagaactcatatgatattctatttaggttggaatcctttttatccaaaaagagcaaaagtaaggccgctaagaaagatgaaggtcagcgctaatcttaataaaccacaatataaataaaaattaggtgtagataatcatcacactttttctctctcaaacccttttaaaggtgaaggagttgactgagttgatcagaaataaacgatatggggttgactatagcggtagtctattacgttagctcaattaatgtgttctactccagtttgcttttttacttttaacgtgtaaaaagtgaaatgttcaaaatttactatcgtttgataagaagtgctgacacatgctataagtgtaaaagaagcatggtcagtttttaattttgggataaaggtttcactgtatcccatcatgaaaggatttggatttgttatgacagataatttctggcgtgaattaccgcggccattttttgtactggcaccaatggaagatgtgacggatgtcgtttttcgccatgttgtgagtgaagcaggcagacctgatgtgtttttcacagagtttacaaactcagaaagctattgtcacccggatgggaaggatagtgtgcgcggccgtttgactttcacggaggatgaacagccgatggttgcccacatatggggagataagcctgaaaactttcgccaaatgagtattggaatggcggaattagggtttaagggcctggatatcaatatgggctgtcctgtacctaatgtggcggggaatggaaagggaagcggcctgatttgccgtcctgaagttgcagccgaattaatacaggcggcgaaagcaggaggtctgccggtaagtgtgaagacgagacttggctacacggatgttgacgaatggcgcggctggctgacacacatactgaaacaagacattgcgaatctttccattcatctgcgtacaagagcggaaatgagtaaagtagatgcgcattgggagttgatcccggaaatcaagaaacttcgtgacgagattgcgccggatacccttttgacgatcaatggggatattcctgaccgtgaaaccggcttgaaacttgctgaacaatacggtgttgacgggattatgattggacgaggcatttttactaatccgttcgcctttgaaaaggagccgagagagcatagcagtaaggaattgcttgatcttttgagattgcatctggatcttcatgatgaatattcaaaagcagaagccagagcatataaaccgctcccccgctttttcaagatatatctccgcgggttccggggagcaagtgaattaagaaatcaatgcatgaatacaaagtcaacagatgaagtgcgtgcattgctcgatgactttgagagaaagtatcttgatgggatggagcaagagtgacataaacaactcatcatccggcccggatttcggtttgaattccgggcctttttgtgtgcagcttttacccagacagatccatggccggtttcgtcatgcagaaataaacgaataatggtacattgataggagatacatcataaaggggagagaaaaatgaaacgactgtgcatcatcccctgcggcaagaaaaaaatttgggatgtccattcagatacagggccggtaagggcggaagacgcttatctcagcccgtttcatcaggcatgcgagcgatatgcgaaagcatttttcgatgagtgggtgattttgtcggcgaagcacggatttcttcgtccggatgatactgttcccggaaattacgatgtcacttttggaaccggtcacccggagatcatggcagcggacgagctgcgccgtcaattttatgaaaaaggcttttccgacgtcgaagagcttgtcatgcttggcgggaaaaaataccgaagcattctaaacgccgtcatcggagagcatcagcatatcacctggcctctgtcatcgtataaaggcattggttacatgcttcaagcactgaatcgggctgttgaagaaaaggatgaactgcagcgcgtggatatgaaaaaaagagtgtaaccactcaaacgccgtgatagactgtatgcggaagaatgaagcaataaaagatttccgaggaaataaatacgtcgatcattgtcaaagacagggtgatgcccggtcttttttgtatgccataaaacgagacaaagggaacggatcgagacaaaatgagacacctgtctcaaactgtctccattgaaaaaataaaaacattcattttacgggcttcaaaggctggcatgcttcttgcatttataagtgtgaaccctaaatagaaggaggcgcacaaaatggaattgttaaaacgagaaggcttgtcattaactgaggaaaaagcgctgtggatgtaccaaaagatgctggaaatcaggggctttgaagacaaagtgcatgaacttttcgcgcaaggagtgcttcccggattcgtccatttgtatgccggtgaagaagcggtagctgcgggggtgtgcgctcatttagatgatggcgacagcattacaagcacacacaggggacatggccattgtatcgccaaaggctgtgatctggacggcatgatggcggaaatattcggaaaagcgaccggactgtgtaaaggcaaaggcggttctatgcacattgcggatcttgataaaggcatgttaggcgcaaatggaatcgtcgggggcggatttacgctcgcatgcggatcagcgctcacggctaaatataaacaaactaaaaatgtaagcgtttgctttttcggggacggagccaataaccaaggcaccttccatgaagggctgaacttagcggcagtatggaaccttcctgtcgtgttcatcgccgaaaacaacggctacggcgaagccacgacatttgagtacgcgtcagcctgtgattcaatcgccgatcgggcggctgcctacaacatgccggggtcacggtggacggaaaagatattttagcggtttatcaggcagccggggaagcgatagaaagagcaagaaacggcggaggcccgtctttgattgaatgtatgacttacagaaactacggccatttcgaaggcgatgcccaaacttataaaacaaaggatgaaaagactgagcatcttgaagaaaaggatgctatccaaggctttaaaaactatcttctaaaagaaacagatgcaaataaattgtcagacattgaacagcgagtcagcgaatcgattgaaaaagccgtctcgttcagcgaaaagagtccttatccgaaagagtctgagctgttgacagacgtctacgtgtcatatgaaaaagggggaatgtgagatggcgagagtcataagcatgtcggacgcgatcaatgaagcaatgaagcttgcgatgagaagagacgacaatgtgcttgtaatcggtgaggatgtcgccgggggagcggcggtcgatcatttgcaagatgatgaggcatggggcggggtactcggggtcacaaagggtctcgtacaggaattcgggcgcagccgagtgctggatacaccgatttctgaggcgggctatatgggtgcggccatggctgcggcatccacggggctgagaccgattgccgagctgatgtttaatgattttatcggaacgtgctttgaccaagtgattaaccaaggggcgaaattccgctatatgttcggcggtaaagcgcaagtgccgatcaccgtccgcaccacatacggagccgggttccgggcagccgctcagcattcgcaggcgctgtatggcctgttcaccagcatcccggggctgaagacggttgtgccgtccaatccgtatgacgccaaaggtttgctgctggcggcaatagaagacaatgatccggtattcttttttgaagacaaaacgtcctacagcatgaagggcgaggtgccggaagattattatacaattccgctcggaaaagcggatatcaaacgcgaaggcagcgacatcacgctgtttgcggtcggcaagcaggttaataccgcgcttgaagcggctgcacagctttctgagaaaggcatcgacgccgaggtgcttgacccccggagtctgtctcctctagatgaggaagcgattttcacatcgttagaaaaaacaaaccggctgatcatcattgacgaagccaatccgcgctgcagcatcgccacggatattgctgcgattgtcgccgataagggctttgatttgcttgatgcaccgattaagcggattacagcgccgcatacaccggtgccgttttcgccggtgcttgaagatcaatatttgccgacaccagaccaaattgtcagcgtcacgcttgaattgcttggcgagccggcaatgaattaaaggagggatacagaatggctgtaaaagtagtaatgccgaagctgggaatggcgatgaagaaaggtgaagtatccgtctggaataaaaaagtcggcgacccggtagaaaagggagaaagcatcgccagcatcaactcggaaaaaatagaaatggaaatagaagcgcctgaaagcggcacgcttcttcacattaaagtcaaagagggagaaggagtcccgccgggaacgcccatctgttatatcggggaaaacggcgaagaagtgcgggagaaggaggcgccggctcctgaaaaagcagggaaaccgcaagctgaacctgaacatattcccgctccaaaagccgggcaaaagcgcaaacaccgcgtgaaaatatctcccgttgccagaaaaatggcggagaaagccgggttgaaagtcgatacgctgaacgggacggggcccggaggcagaatcgtaaaagctgacgtcatcaaggcgatgaagacagaagctgaaccgcagtcttcggttcagacagcacagccggagggaaaaccggcttcagcgatgagaaaagtgattgcagaccgaatgcacaaaagcctgcaaaacagcgcccagctgacgctgacgatgaaagcggacattacggagcttgtaaaatggcagcagcagctcgccgacagcgcgaaaaagcggagcggtgttaaactgacggtcacacatttcatatcccgggccgcggtgcttgcgctgaaacagcatcctgagctgaacagctcttatcaagaggagcggatcatcacctatccatatgtccacctcgggatggcggtttctcttgaaaacggtctcgtcgtgccggtgatccgggatgcggaaaagctttcattccttgagcttgcggatcacatcagcacatcggcacgccgggcgcgggaaggcaatgcttccggagatgatctccacggttcgacattttctattacaaatctcgggggttacggaattgagcatttcaccccgattcttaatccgcctgaagccggtattctcggagtgggcgcaagctatgaaacgccggcgtttaaaggagatgagcttgtcaaaagcatcatgctgccgctgagtcttacctttgatcacagagtatgtgacggcgccccggctgcggacttcctgaaaacggtcaaagcgctgcttgaagagcctgccggtttgattttatagagagaggtgaaaaaatgaaactagccattatcggcggcgggccggccggatatgcagctgccgtgactgccgcgcggagaggagcagaagtcgttctgatcgacaaagggccgctcggaggcacttgtctcaatgaggggtgcatcccgacaaagtcgcttttggaaagtgcgaatgtgctcgataaaatcaggcatgcaaatacattcggcatcgaactgccgcaaaacattacactcaattggaaccgcatgcaggggcgcaaacggcaaatcgtcagccagctcgtgcagggaattcaatacttaatgaaagcaaatcagattaaagtcatcagcgggacagcctcatttctcacagagcagacattgcttgttgaagaagaaggaggcgcaaaagacattctggaagcggaccggatattgattgcatccggatctgaaccggcggagctgccgtttgccccatttgacggcgattgggtaatcgacagcaaagatgcgctttctttacagaaaatcccttcgtctctgctcattgtcgggggaggtgtgatcggctgcgaatttgcctctttattcagccggtttaaaacgaaagtgacggtgattgaatcggctgaccggctgctcccggcagaagacagggaaatcgccgccgttttcgaagactctttaagagacagcggggctgatattcagacaaaagccgcccttcagcggattgacaaagaaaggaaaaccgccgtgtggacaaaagacggaaaagaaattgaagctcaggctgatcacattttggttgcaatcggcagaaaaccgcgtttgcaagggctgaatttggatcaagccggcatccggtattctccgcgcgggattgaagtcaatgaccatatgcagaccaatgtgcctcatatatatgcgtgcggcgacgcggccggaggaatgcagctcgcgcatgccgccattcatgaaggaatcacagccgccgcgcatgcctcgggaaaggatagcaaagtcaatatgcgggcggtgccccgctgtatttatacatcgccggaaatggcagctgtcgggctgacggaaacacaggcgagagagacatacggagatgtgaaaatcggagaatgctcattttctgctaacggaaaagcgttaattaagcatcagcacggcggcaaaatgaaaatcattgccgagccggaattcggagaaatcgtcggggtgtcaatgatcggaccggacgtgacggaattgatcggtcaggcggtcatgatgatgaacggtgaaatgacggcggatatgtcggagcactttatcgcggcgcatccgactctgtcagaaacgcttcaggaagccctgctgaatgtcaccggacttgcggtgcattccgtataaccggaataccctttctcagatgagaaggggtatttttcgttgaaagcgctttacttttcccctacaatatatgaaaagatggtctgaacaggggggagcgaatacaatgaatgtcattcggaatgattttaaaacctggaagcgctttgtgaaagaaggcgtgctcgatgaatcccgtattcagaagcgggtggccgcctcatggcaccgctgcaaaaaagccgacgtcaacccttatctagaaaagggaccgaatgtaatgccggcagatcatttagaaaggcaggccgaaaagcatgcgttatttttagcggcctcaatgccgcacgcagaaagaatgaaaacagcgatgcgggaaatggaaatgatggttctcctgattgattcagacggcgttgtccattcagttgacggccacccgcgcaccattcatgaagcgaaccgcatcaatttcttaaaaggcgcccgctggacggaaacggccgtcggcacgaatgcgatcgggacggctctttatacaaatgaaccggtcatgatacacggctctgaacattattcgctcgcttctcatcaatggagctgttccgccgcgcccatccgttatgaagacgggcggctggcgggtgtcattgatatttcctgccccgccgcccgcgctcagccttttatgctcggaattgcctcctccatcgcttatacggcggaacgggagcttgccctaaagatcaaaatgacagaacttgacatgatcagcaaattcgccgggcttacccggtctcatgatccgatcgtgctttgcaatgaaatgagccgggttatcgccgcaagccgtcccgttcagcattttaccggacatatgctgcgcgagcttgaggaacagggctatcatatcaagcggacgaagcgggaggagaacggcttcacatgcgtttacttatccaaacgggaagaaaagccgtcgtttatatttcatggtgcggcaggcaaaagcccgtcatcccgacatatgcttgagcagctggagcttgtcgcccgaacggacgcaaccgtttgtcttacgggagaaaccgggacgggaaaggaggttgccgcccgggcgattcataacaacagctccaggaaaaacggcccgtttatcgctgtcaactgcggagcggtccccgaaaagctgattgaaagcgaactgttcggctactcggaaggcgccttcaccggggccaaacggaaaggacatagcggcgctttgcaaaaagccgataaaggcacgcttttcctcgatgaaatcggagaaatatcacactccatgcaggtggctctgttacgggtgctgcaggagcggaaagtcaccccggtcggcgggacaaaagagattcccgttgacatcagaatcatcactgccacccacactgatctgagacagcttgtcgaatgcaaaaagctgagagaagatttattttaccggcttcacgtctgtccgatccacctccctccattaagagaacgcaccgaagacattcccggactcttccttgaatttcagcgaaatcgcggctggcggggggagcttcctgttgactttttagacgtattaaagagccggaaatggccggggaacatcagggaattgtttaatgtatttgaacgtctttccgtcatgttcccggacggacggctgtcagggcgccccatcgcagccctgcttgaagcgtcaggtcttaaagaagcggccgagtcttatgaacaggaagaagcgtcctctgtctccatccgggagcacattcagaaaaacatcatcgtaaacgcgcttgaatcagcgaaggggaatgtcacgctggctgctaaaatggccggaatcccgcggagcacgttttacaaacgcctcaaaaaattcaaactcaccgccggacaattgtaagaaacaagcatacttctcttgggtgccggacacgttatgtgtgaggactaaaggaggtttgagacgtgaatacacagcgtgcgaaagacatttcggaatccgccgccatggcgtatgtgacgtatgaaggagtcccgatttatattcagcatgtcaacgaagacaaggaaacagccaggatttttccgatcggaaatccacaatttgagcaggaagtgctgctttctgatttacaagagcatttttgagaaggggtctgctgatgacagcaggcctttttcgtacctgtgggaactttcccgctttttgagaaaaataactaaaaatgatcaaatgatctaactccttcaaacccggtacagatcggaccttctcatgatataaataaaatgtaaacgttatcagaggagggcttcacatgacagacaaatcattctcaatcgttattgcaggcggcggcagcacatttacccccggaattgtattaatgcttttgaatcacctggaagagtttccgatcagaaagctgaaactttatgacaatgataaagaaaggcaggagcggattgcgggtgcgtgtgaggtattcataaaagaaaaagcgccggacattgaatttttggcgactgatgacccagagacggcttttacggatgttgacttcgtcatggcgcatatccgcgtcggaaaatatgcgatgcgcgcgctcgatgaacaaattccgctgaagtacggcgtggtcggccaggaaacatgcgggccgggcggaatcgcatacggcatgcgctctatcggcggtgttctggagattcttgattatatggaaacgtactcgcctgacgcatggatgctgaattactccaatccggcggcgattgtggccgaagctacacggcgcctcagaccgaattcaaaaatattgaacatctgcgacatgccggtcggaattgaggatcgcatggcgaacatcctcggattatcttcacgaaaagaaatgaacgtccgttactacggcttgaaccactttggctggtggacgtccatcacggatcgagaaggcaatgatttaatgccgaagctgaaagagcatgtccgtgaatacggctacgttccgaagacggaggccgaacagactgaagcaagctggaatgacaccttcaaaaaagcgcgcgacgtacaggcggctgatccggatacgcttccgaacacatatctgcaatattacttattcccggatgatatggtgaaaaaatcaaatccgaaccatacgagagccaacgaagtcatggaagggcgcgaagctttcattttcagccaatgcgatatgattacgcgcgaacaatcatcggagaacagtgaaattaaaattgatgatcatgcttcctatatcgtcgatcttgcccgggccatcgcttataacaccggggagagaatgctgttaatcgttgaaaataacggtgcgatcgcaaactttgatccgtcagccatggttgagattccttgtctcgtaggttcaaacggaccggaaccgctctcagtcgggaacataccgcaatttcaaaaaggcctgatggaacagcaggtgtctgtcgaaaaactgacggctgaagcgtgggaagagcggtcatttcaaaagctgtggcaggcgctgatcctgtcaaaaacagtgccgaatgcccgtgtggcaagactgattcttgaagatctgatggaggctaataaggactactggcctgagcttgatgtaagcccgtctcctatttcctgatgacaatcttccccgttttctttatctgttattctatataatagaaagaaaacggggggatttttgggatgagtcttgaagaactggttaatcagcattacgcgaaattaaatgacaacgatttttatattttaaaatatatattgaatcataaacatacgtgctaccatctcggtatcaatgacatggcgaaagcctgtaatgtctctcggtcttccatcctgcggctcgcccaaaaactgggcttcagcggctatagtgaattccgtgtttttctgaaatgggaggatcagcctgaagagggcgagaatatgacgtttgaaaagctgctggatgatattgaagccaatgtaaaatacgtgaagtcaaaagatatgacggagatgtgccggctgatagatgaagcaaaacggattttcgtttacggatcggggacggctcagagggtgtgcgcccgtgagctgcagcggatgtttgtatcccggcggaagtatctgattttaattcaggacatcacagagtttaatatcatgtgtgatgattttaaggttgatgacgtattcatcattatttctttatcaggcgaaacacccgaattaattccgcaggtaaggaccctgtccgcaaagggagttccgtttatttcaatcaccaatctgaaaaacaacgtactggcgcaaacgacgccgtataatctttatgcgaccagcaagccggtgacgttaagcgataaaacggaaatcgtcgcatttgccccgttttttctggtgggcgaagcgttattccgtgcatatgttgattataaagagctcgaaaattttgataaatagcgggaggtcacgtgaaatgatgcaaaaagtccagcgcttcggcagcgcgatgtttgtgcctgttttattatttgcattttccggtattattgtcggtctgagcacgctgtttaaaaataaaacgctgatggggccgctggctgatcctgacgggttttggtatcaatgctggtacgtcattgaacagggcggctggaccgtctttaatcaaatgccgctcctgtttgcgatcggcatccctgtcgccttagcgaaaaaagcgcaggcgcgggcttgtttggaagcgcttacagtttatctgacattcaattactttatcaatgcgattctgacggtttggggcggggcttttcatgtcgatatgactcaggaagccggcggaacgagcgggctgacgatgatcgccggcatcaaaacgcttgatacgaatattatcggcgccatctttatttcatctattgtcgtgtatttgcacaatcgttactttgataaaaaactgccggattttctggggatttttcaaggatcttcctacatcgttatcatttctttcttcattatgataccgatttcacttgcggtggcatacgtatggccgatggttcagtccggaatcggatcgctgcaaagttttctcgtttcttccggggcgatcggcgtgtggatttacacattcctggagcggattttaattccgaccggcctgcatcattttatttactcgccgtttatttacggtccggctgtggctgaaggcggtatcgtcacctattgggcccagcatctcggggaatactctcaaagcgtcaaaccgctgaaagaattgttcccgcagggggcttcgcgcttcacggcaactcgaaaatcttcggcattccgggaatcgcgctcgctttttacgccacggcttcaaaggaaaagaaaaaaatcgtcgccggccttttgatcccggtcaccttgacgtccattgtagcggggattacagagccgattgaatttacattcctttttatctcgccgtttttatttgcggttcatgctttgcttgccgcttccatggcaaccgtcatgtatatggcaggcgtcgtcggaaatatgggaggcggtttgatcgaagctgcgaccttgaactggatcccgctggcgtcaagccacggtttgacgtatgtataccagatcatcatcgggctgtgttttaccgctgtttactttttcgtcttccgtttcctcattctcaaattcaacatcgccacaccgggcagagaaaaagaggaagggcaggaaacaaagctctattcgaaaaaggagtacagagaacggaagcaggcttcaaaagaaacggctgcggcagacgaaacacagcgggatacagccgctttgtatattgaagcgttgggcggaaaggacaatattacggaggtcaccaattgcgccacccgtctccgcgtcactgtcgctgatgaatcaaaggtcaaaagtgacgccgatttcagagagctgggagcccacggcgtcgtcagaaaaggcagggcgcttcaggtcattgtcggattaggcgttccgcaaatgcgggagcgcattgaacagcaattggatcaataaggtcaaaaccttcccctccccgggaaggttttatctttttcgcagattattgaaaaaacggcacaccaaatttctttattcatttgccggaaaggcataaaataataatattgaacaaaggatttggaggcttacacatgtcaaaggctttatcatatgtaaaaccgtattcccttttggcgggaatcgctctgtttttcatgctcatcgagcttgcggtagagctgatacagcccctgctgatcgggaaaatcattgacgaaggaattttaaagcaggatctcggtacggtttggctgtggggcggggtgatgatcggactgaccgctgtttcattcgcatcgggaattttaaattcattctactccgcccacatcagccagagctatgcgtatgatacgcgaaaagggctttttcaaaaaattcaatccttctcttattcgacgtttgcgcaattctcatctacgtcgtttatcaccaggctgacaaacgatgtgacgcaggtccagaatatgcttttcatgagtctccggtttatgctcagggcgccgttaatgattgcggggggcattattctctcgctgaccgtcaatgcgaaactcggtttttttctgctgatcacggtgccggttttgcttttgtttttgctgtgggtgctgaaaagaggcggcgcgctgtttcggtccgtgcaaaagcggcttgatcaggtcaacacgatcatgcaggaaaacctgacggcgatcaaactgattaaagcgctcctccgtgcaaaccacgaagtgaaacgttttttgaaatcgaatacgaagctgatggaaaaaacggtttccgcttttcgtctcgtggaagcggcgatgccgattttaatgctgctgatgaacagctgcattttgtttatcttatggttcggcgccaaaagcattgctcagggcggagcgcaggtcggcgatgtcgtttccgtcattaactatgcgacgcggattacaggcgcgctgtccgtcctgccatttctcattatggtattttcccgggcgaaggcttccggggaaagaatcggcgaggtgctggaaacagaaggcggcgagggaacggggcacgacccggcgcgggcgcttgcaggcgggattgagtttcgcgaagtgtccttccgctatccggacatggaaaaagacgcgctgcatcacgtgtccttttcagccagcccgaaagaaacggttgccattatgggcgcgacaggttcagggaaatcaacgctttttcagctgattccgcgcctgtacacggctgattcaggcagtattttcatagacggcaaaccgatcggtgaattctccgcttgcgggctgcgcagggaaatcggctatgtgccgcaggaagtgcttctgttttcgggcacaatccgtgaaaatatcgcctggggacgggaggaagcttcactagatgaagtaatggaagcggccaaagacgcgcaaatccatgacacgattatgaagctgtcaaacgggtacgacacggtgctgggacagcggggcgtcaatttgtcaggcgggcagaagcagcggatttccatcgcgcgcgcttttatcagaaagccgtccctcctgctgttagatgacagtacgagcgcgctcgatcttcaaacggaagcgaagcttttacaagcgatcagatcctatgaatgcacgacactgattattacgcagaaaataaccaccgcgatgaaggctgacaccatcttattgcttgaagacggcgaattgctggcaaaaggcacgcacaaagagctgatggcacagtctcatctgtaccggcagatttatgaatcacaattcggaaaggagggagctgacagtggagaaagacattcgtaaacctttccgatatccgaaaataccgctcaaatcaaatgaaggcggcagaaaacgcgcgaaagcaaaagatacaaaaggcacgctgcgcagaatctggtcgtatgtagccgagaaaaaagggcttttaacccttgtgatcatcatggtagtcataagcgccatattcggcctgctcggaccgttcgtcatcgggaaagcaattgatcattttatcgtcggacggacgacggacggattggcgggtgtactgttcatactgtttgggatttacctcgtgcaatcattgtccttatggtttcaaaactattggatgatcaatatctcgcaaagcaccgtgtttaaaatgcggagcgagctgttcacccatctgcatgagctgccgataccgttttttgataaacagcgcctcggcgatttgatgagccgggttaccaatgatatcgaaaatgtcagctccactttaaatacatccgtcattcaagtgctgtcgagcgtcattacattcgtcggcacaatcgccgtcatgctgttcatgagcccgcttttaacattgatcacgcttttgattattccgatcatgcttttgagcattaaatggatcaccaaccggacgggactcctgtttaagcagcagcagaaaaacctcggcgagctgaacggttttattgaagagtcgatatcaggagcgaaggtcattaaagcctattcgagggaagaccgcgtcatggagcaatttttagaaaaaaacgcggcgttacaatcatcaggcttttgggcgcagacaatttcgggattcattccgaaagtcatgaactctttaaacaatttaagctttacgattatagcggcggtcggcgggctgtttgcgctgaaggggtggatttcgatcggttccattgtcgtattcgcagaatactcgcggcagttcacgcgccctttaaatgatttggcgaaccagttcaatacgatgttatcggccatcgccggggctgagcgggtgtttgacgtgctggatgaaaaagaggagcgggaagatgaagagcatgcgacgcaccagccgatcaaaacgggagagattgaattccgagatgtctccttcggctatcaggaagacagcccgatcttaaaacatctgtccttcagcgttccgaaaggacagtcaatcgccttcgtcggaccgaccggagcgggtaaaacaaccgttacgagcctgatcgcccgtttttacgagcccaataacggaaaaatcctcattgacggaacggacatcaaaaaactgacgaggtccagtctgagaaaaaacatggggtttgtcctgcaggattcctttctctttcagggcaccatcagggaaaatatccgttacggccgtctggatgcatctgatcaagaggtggaggcagccgcaaaagccgccaatgcccacggattcatcgaacggctcccgaaaggctacgataccgtccttacccaaaacggcgcgggcatcagccaaggacaaaaacagcttatttccatcgcgagagatgtgctggcggatccggtgctgctcattttggatgaagcgacgagcaacattgatacggtgacggaagtgaaaatacaagaagcgctcggccgtttaatggcgggcagaacaagcgtcatcatcgctcacaggctgaacacgattcaaaaagccgatcagattcttgtgctgaaagacggcgaaatggctgaaaaaggaacccatgccgaacttctcagccagaacgggttttaccgggaattatatgagagccagttccgggaatcataggtagggaaaaagacctccgacagagtgcggaggtcttttttttgcgaagacaaatagtacttttaagttattttcgttaaatgtaacaaaattacttgacgtaaataagttatgtatatatactagcttacataaagtaagtgataataattttcaaggaggattttatgaataaatcattcgaaacaggaacactgcttttaagggttgtaacaggtattatcttttttgttcacggtttatccaagtttcaagggttggaaggaactacgcaatttttccagagcatcgggcttccggcctttatggtctacgtcatcgcgacgattgagcttgtcggcggggtactgatctttttcggtttggcgacgcgcattatcggcgttctgtttgccgtcacattagtcggcgccatcttcacggcgaagctttcctcaccatttatgggcggatcggaatttgatttcatcttactggttgcgtcaattcacttagcgctttcaggaagccgtctgctttcattggatcagctccttttcaaatcaaaaaagggagaaactttttcagcataagaaagaaggcgttcaaatgaccggcattcatcaagatacagcaatcggttatgtcaaattgacgattaaaaatatggaacgctcgctcggcttttatcggaatgtcatcggccttcaagtcatctcgcagacagatcgttctgcagaactgtcagcagacggaaaacgcgtcctgctggtgcttgaagaaaatccgagcgccgtcgttctcccggagcggtctgtcaccggcctttaccatttcgcgatacttctgcctgaccggaaagaactcggcatcgcattggccaggctgattgaaaacggcatcgcgctcgggcagggggatcacgcagtcagtgaggctctttacttgtctgatccggacggcaacggcattgaaatatacgccgatcgtccccgcagcacgtggcgccgggatgcagagggcaattacgtcatgcaaacggcgcccgtcgatgtggacgggcttttggaagaagccggagctgaacggaaaagccgtctcccggaaggaaccgttatcggccacatccatcttcatgtgacggatttacaggaagccaaagcgttttacaccgatatcctcggttttgacattgtcggcaattacgcgggcatgtccgctctgtttgtttcggcgggagggtatcaccatcacatcggtctgaatatatgggccggaaaacatgcgccgccgaaaccgggaaatgcaagcgggctggattattacaccatcacgctgccgcatcaaaaagagctgtcacgtgtgacaaaagcgctgaccgatgccggctttgagatcgaagaaagagaagagggcgtattcgtcaaagaccctgtatcaggggcggatatcgcatttacactgtaagaaacaacccttgccgtctaaccggcaagggtttttatttttctaaaggctcgggaaagaagaacgtcgatttgcaatatacacccggcttttgtgtgactgaagagagcgaacatctcagtgaggcgcaaacatgacgcgtggagcccgccatcgccggcccgaactcagggcatccgctggattgaaaatgggtgtccgttcggcggatcagggagctgtatgggcagactttgaatagaaaaagggaagagccgcatccggtcacaagatgcggcttttcatatacaatttacaattgtgtgaaaaatgcccaaaataaattgtacttcctgattcttcctgatatgataagccgaaaaaggagaacctccacaaatgaattcaaatgcagcacagacggaacagtctatgaagcataacggaaaccggatgacgttcaaggactttatcattcttgccaaaccggggattatcatctcaaattcactcgccgcattaggcggattttggatcgcgtggcttcagtcggaaaggacggacggagggcccggtatatttgccgccatggcggctgccatgatcggcacggcgttagtcatggcgtcaagcactgtttttaataacttctttgaccgcggcatggacgcaaagatggagcgaacccgcacccgcgccagcgtcacgggaagaataccgccgacggtcatggtcctgtacggcacatgtctcggcgtatgcggattcatcatgcttgcttcgcttaatgtactgaccgccgttcttggcctgcttgcatttttgctgtatgccgtcgtttatacgctttggtttaaaagacaatccgtctggagcacatttgtcggcagctttccgggggcggctccgcctttaatcggttattgcgcgctggccgggtacattgatatgcccgcgattttgttatacgcgattatgtttttgtggcagccgccgcatttctgggcgatcggaatcaggcgaaaggaagagtatcgtgccgccggcattccgcttttgccgatcataaaaggcaatcgcgtcacaaaaataaaaatgctgcgctatatcgccgttttgactgcggtttcgctgctcgttcctctttatatagacgtcagcccgttttataccgcgtccgctctcctgctcggggccatctggctgtaccggagcgtcaaaggctttcaggcggcggatgacacgcaatggtcgaaggggatgtttttttattcgattgtttatttcagtctgctttttcttattttaatggctgattcgtttatcaatgcggtcctcagaacgtaaacaggcggcctgcagatacagagccgccccgttttgtttatgcttttttgatgagagccaaaatatcttcaagccaggaaatataattccgttcccgctcaagcgcttttgtcagcacgagataatggccgaaatcaggagaagaaaatgaatccgcctccgcggacgatgtcatcagttcttgataactgttttccagatcggacaatttctcctgccgctttacgagctgatcggtgaatagctcatccgcttcttcctgcgtcaaagctgagatgaaataagccttcagcataaattcatccttcaccgtttccggaatcgggtcttttttcgtcagccaggcagcaagctccagctctcccttgtcagtcagcgtgtacatttttttctcaagcttcgttccttgaatcgcagtgcgaaacgtaataaatccctcagccgtcagtttttttaattccggataaatctggctgtgctttgcgctccaaaactggccgagctcttccttaaaatagctcgatatatcatatccgctcaattcgccttttcgcaaaagccctaaaatcgcgtactttaaaattctcatgttgtcctccaagcccattcatttgacagctagtataccatacggccgctcaaaaacgcagaagcaccggatgcttatcattgaatccgcggcgccaaaatcagcaaaaatatgcagaaaggggttatcgaaacggcagcagaactggaaaaagcctttctcgtgtctttgcctcattcatatgacatcatgatataatcattgtaaaaattaataaatactgggagggacatatgaagacggtgattgtgtatgcaaacccggatgagaacagtttcaatgcggctctcgtaaaatacgtcgccatggctttaaaggacagcggccaaagctatacggtcattgacttatacgccgatcaatttgatcccgtgctgaagtacggcggcgaaaaaaagcgctctgacatgaaccgggacgctgaaacgaagaaataccggaaactgatgaaagaagcggatcatctcattttcatctacccgctgtggtggggaggcgttccggcgattatgaaaggcttttttgacagagtgcttgtcgccggagaagcctacacatatgaaaacggccgcgtaaaaggactgctccgggcagagacggcacaggtcttttatacggcggactccccgggctggtacttaaagtggttccggaaaaactcggactggattacgctgaaaaaaagcattctgcaattttgcggcattcaaaaagccgagcggaaccttttttctgtcgtcagaacgagcacacccgaactgcgggaaaaatggctgcgccaagcatacgccaaagtccggcgcgcttgtgaaaaaggagcggccgcatgcagataaaagaaattttcgtgattcgctgcctgtcctgtttaagtgtcgttctgcttcacgcagtttcaatggtgctgatgattcaggaagagtccttagccagtgccgcccatacggttgatgcgtttcggaccctcttgatgttcagcacgccggcgtttatctttatttcggaatttctgcttgccaggtcatacccgaaaggcgttccagcgggttttttaaagaaaaggggcaaagtcattttcgtgccgtttctgtttattgccgcggtggatgccattttaatgaaaagcgtggcggaagaaggagccggattcgtttcagtgatcggtaaatttttagaaaatgtgtttttaggaaacttcatcggctacttcattcttgtgatctttcaattttacattctccatatgctgctgcaccgctggctgaacaacacatcccccgtgtgggtgctgtctgtttcgtttatcatcaacgccgtctatctggcttacttttccatctttcatccgccggcatcatcggggcttgattctatttttccgttcttttgggttccgtttccgggctgggtgttttatttctgtctggcattttattgcggaaaggaatatccgcgttttttatcgctcatcaatcagtaccgttatgcggtttacttcagtgcggccgtatcggcaatattgattgtggccgtttcatatatcagcggcggctccatttcctctaagcgtccggatattatgatttacgcggtcagtatgatctttctgtgttttcatctgttttcaaagctcaaaaaagtgcccgcgattgtgatgatgatcagcaactattcgttttcaatctatctgctgcactcctactttttaatcagcggatatcttctggaaggctatttgcggtcaatgcctttagcggctgccatccttcttttatttttgatctgcacgctaggtcccattttcgtatcgtgggggtgcaaccatttcagatacggatacctgtttgtcgggaaagtgtatcagccgaagcagaccaaaagaaatacggcggcgcatcaaggccgcacagtctgaaaaaaaggcggcgcttcggccgcctttttgatacgggtccgctttatccggcacgaggacggatagttgtacatcctgcatacaaagccccgcctgcggctgttttgacggatgcatttatgacaaaataacgccaccgattttctcccttgtgaagaccgatatattgtatacttataggaaatactttcaaaaaaagtgaaaaagagaaaaactgtgagcttggatgaacgactaaaaaggagcggggacattatgaatgactgtgtcaaaacattcggagaacttccggccgaactttattcctttgcgggaggaaaaggaagcattctctctaaaatgtatcaaagcgggtatcctgtgcctgaagggtttgtgattttgccgtcagcctttcaggacggacagctccgccatcaggcgagagaggctgttgatcaatatgtgaattccatccgcagccgccatgcatctgcgttgtttgccgtacgctcatccgcgctgagcgaggattccgctcaggcttcctttgccggagaattcgatacggtgttgaatgtcagaacagatcaagacatgtccagggcgattgatgaagtccgccggtcggtacagtcagaaagagtaaaagcgtacagcgccgttcagggaatggaagatgagcatgaaatcgcaatcgtcatccagctgatgataccgtctgagatatccggagtgctgtttaccgcagatccgattacggggagcaggcgggagatgacaggcaattacgtctacggtctcggggagcagctcgtttccggggaagccgatgcctattcttttaaactggcacggcccaagaaaaaatatgacggccccggggaatttcgcaaatatgcgtcaaagctctataaactggcgaaaaagctggaaaaagatcttggagggccgcaggatattgaatgggccgccgcgggcgggacattgtatattcttcaatcccgcccgattacgaccttacaagccggaaatctggaaacctatgaatggaacgattctttcagcggtgattttttatggacaaacacaaatataggagaagcgattcccgatgtgatgacgccgctgacatggtcgctcctccggaatctggatgaagagtcgggcatcattccgggctattatgtctggtccggcaatatttgcggcagagcctataacaatatgagccagcctctttccgttctcgccgctttcggtctgaatccgaaaggcggaaaaattggaaaaatgatgagcgatacattgggagaaatcccggcggaaatgaagatacctttatatccgttctcaaagtatgaattattgaagatcatcccgaaaaaactgaaaccgtatctgtcgaaaatgaagcaagcgaaaaaaacatgtcctcctacttggacgaatcaccggagtggtgccggaatattgaggaaaagctgaaacgcgccgaaacggagcaggcattattagcgatatggaacgatgagatctatccgtatttatgcaacgcgtggtttgcgttaatatccggcgggcgtgattctgcgcaatcctcttcgtcgttaacctctcaattaacaaaactcgcaggcatagaagatgcgaatctcctgctttccaatctgaggggaaaaggcggactggccagcctggagccgattatcggcattgatcaagtcatgaaaggccgtatgagcgaggaagaatatctcaggaaccagggccaccgtggcccgcatgaatacgaactttccataccgcatccgggagaaaaccgggattggctgacgaagcagatcaaagaacacaaggagtcgggtattgatgccgaacaactgcttttgaaacagcagcgggcgcatgaacaggccttccgaagatttgaaaaaaagtttcctcataaggtcaaatggctcaaagccaaaatggaaaaagcgtcagaatacgcgaatattagagaaacaaccagatccgaatttgtcagagtgtaccggacagccagagcattcgcgctcagagcggcggaaatgaccggcatgaaggacgatattttcttcctgtatctgcatgaaataaccgatctgctcgcggggaaagagccggcggttgcgtcgattcaagcgagaaagcaaaactatgaaacctataaaaaactgccgccgtttccatccgttattaacggaagattcaatccgtttaaatgggctgaggatcctgacagaagagcggattattacgatgcttttatgcctgcggaaacggatgatgcgcatactttaaaaggtttcgcgggagcggccgggagagtggagggcattgtccgtgtccttgatgctccggaagacggtgattcttttgcggcgggggaaattttagtgacgtcgacaaccaatgtaggctggaccccgctttttccaagagcggctgccatcataacggacgtcggcgcccctttgtcccacgcggcgatcgtcgcccgggaactggggattcctgccgttgtcgggtgcggaaatgcaacgtcaaaactgaaaacgggggacagggtggccgttgacggcgggcaaggcatcgtccagctggaaccgcggcagactccggtcacttctgaagaggaaaatggtaaactgatagaatagaatcatgagaaaggagccgcgcatgaataaagcagttattaacggggagcaaatcagaagtatgagcgacctgcaccagacattgaaaaaggaacttgcccttcctgagtactacggtgaaaaccttgacgctttatgggactgtctgaccggatgggtggagtacccccttgttttagaatggagacagtttgaacaaagcaagcagcttacagaaaatggcgccgagagtgtgcttgaggtctttcgtgaagcgaaagcggaaggctgcgacatcaccatcatactttcataatacgagcagcgggagagagacaaaaatggaaaaacaaaccctcagccatccgattggagagtatcagccggctgaatcgatttcggccggacagaaacaagaatggatcaatgcgctggaacacgctccggctaaactgaaccaagctgtcagagcgatgtcggccagtcagcttgatacgccgtaccgcgaagggggatggactgtccgccaagtggttcaccatctggcggacagccacatgaacggctatacccggtttaaattgagcttaacggagaatgaaccggaaatccgtcctatgatgaaaaaggctgggccgctcttcatgattccaaaaccgccgcttgcggggatgcgcttgagctgttaacgatcctgcacagaagatgggccgctcttttgcgctccatgacggaagcccaattcaaacggacatacttccatcctgtatctaaagagacggttacgctggaacaggcgctcgggctatatgtctggcactctgaacatcacatcgcccatattactgagctttcccggcggatgggctggcatctgtcttagaggatgccggcttccggaaaaacgccaaaacagccgcagacacaatcgtgcataatgaaatgacggcggctgccgtataaagatggtggtagccgctggaaatgcccgcttcaatcgcatcagaaaccgcttttttgacggcgggaacggggattcggcttacctgctcctgcaacgaagaaagtccgccgccgatatcgggcgtttgcgcctgatcagcgggaatgccgcttttcgttaaacggtttttaatgtcctctccgatccggtcaaagcccgctgtaatgaagccggcatataaagccggagcgagcgtcagcccgacctgtcttacgagtgacagcgtgccgagcgctgttcctttgttttggcccgccgtttctgatacaagcacattcagcggagccccgagcagaaatccgaaaccgatccccgcaatgacactcgccgtgacaaattcccatttatccgtcacccataacggaaacaggctgaagcccgcaaaggcgatggcgcctgatacaaccgcggagaagaccggtccttttttatccgtgaccgccccgccgagccacgctccgatgcctgacgccaacgcaagcggcgtcatccaataacccgctttctccgccgatacgtgtaaatattgctccgcataagaaggaataaaaatgaccgcagcgagcagccctcccgataaaaatccgatgacaagcgtccattgaaacactttattttgcagcagcgagtaggcgagaatcggatcgcccccgcggtattcaacccgcttttcgaccttaagcagcaccagaaagagaagtgccgctcccaaaagatacccatacacctttacgtccattatgctttctgacagcttcgtcccatcgagattcgtgataccgatcatacaagataagatcgcaagagacagcagcattgtgccggcgagatcaagccgtttcgcctcaggctctttcgtttcagcgataaacaaaccgccgcacacaaccaaagcggcggcaatcggcaggttaatcaagaacagccaatgccacgatccggttacatcaagcaaaaagctcccgatattcggtccgaggacggccgccataccgttcatcgcccctaaaagcccgagagctttcccctgtttctccttcggaagcacggccagcacatgcgaactcccgattataaaaattccgccgccgccaagcgcctgaatgagccgtgccgccaaaaacatcgggaagctctgactgagtgcgacaagcaaagagccgagtccgaacaggccgacttccatcataaacagttttttccgcccgtatcggtccgacagcttgccgacaatcggcacactgacactgagtcccaatgtgtaaagggtcactccccatgatccccatgaaggagaaacatcaaaagagctgttaatcgtcgtcagagcagcggaaataattccgttgtccagcgccgccatgaacacaccgatcgtaaaaagagtgatggcccggctctggtttttttctgtttgcaatggatccggcatactgatcaatccttccttttttaattcacttcgaatatattattcacttcaagtgaattaaatgtcaaacaaaaaaaggccgccgataccggcaggcctttttcatctctatgcctgtttggaagaatcaagggctcttgccaagatggcaagtccttgattgaccgtttgtttttcttcagcggtcagcgtttccaatgaacgcttcaattttacatgtcctttttgataaaggctgcggaaaatatctttcgcgttttccgttaattgaacgacgactgaacggcggtcttcttctgacggagcgcgtgtaatgaaacatgatttttctaaacggtcaaggagccccgtcgtatttgaaagagaagcgcccattttctccgctatgtcactcaccttaagcgtcccgtggttgttcagaagcatcagcaccttcatttgcggcatgctcatatcaagcttcatccactccgacacatcgccgagtcccgccgaggtcatcactttcatgtacagcacccaaatatcccgttcctcaggagaaaaaatatcgccgcctaataccgttgtatcatgcagattataatccatcgtctcacttcctcattcatactcctgcataccatattactgattttaatcagagaaagaaagttgcagacgagttttgtttgaatgtgaggtggtagtgtataatatgttggagattattgggggaattataataaataagctattttatgatgattggagagaacattgctgactaaaaagaatgccttatcgatattaaaagtattatttcctattgcagttttgcttttagtcatttatcagtccaaaaaggaattgacagacctttcttttaaacgaacgctgtatattattaacgggattgagcgttacgatttatttattctcgttctgctcggtctccttgccgtcagcgcgatgtccttttatgactttgtgctgaaacggacgcttcgcctcgacattccgaattggaaagtattcagggtctcctttatcgccaattcctttaacaatgtccttggattcggcggtctggcgggcgtcgggctgcggacgatgctttacaaagagcatacgaatgacgtaaaacgccttgtcgcaggcatcgcctggcttacgtcctcagcgctgctcgggctgtccgtcttcagtatcctgaccattgcccgcattctgccggtcggagagattacaggtgagaaaccgtggctgtgggctgtaatcgccggagtggcgcttattgtgccggcagccttaatcgccgcttgggtcaacaataaaaaagctcgcgcagaagacggtgaagcaaaaccgaggcatccggttttttcttacatcggggcatcgtttgccgaatggtttgcggcggccgtcgtcatgtattattccctgtatgtcatggggattcacgcggatgtccgccatgtattcggtgtatttgccattgccgctatcgggggaatcatcagccttgtgccgggaggattcggttcgtttgaccttctgtttctgctcggtatgcagaatatgggctttccgcaggaggcggttgtgacatccatcgtcatctaccggattgtgtattcatttattccgtttgtgttcgggctgttctttgcggccggcgatttaacggaaaatacgcttaaacggctggaatcaaatccgaagatggcgcccgccgtggaaacgacgaacgtgcttctcgtattccagcgcgccatcttaatcagagtgctttacggttcgctgtcgcttttagttttcatggcgggagtcgttgtgctggcatccgtcgccctgccgattgacagggagacggtcatcccgcatattccgcgcccggcgctccttgcgtttaacgcgttatcgttaagcgcggctttgattcttttaatcttgccgattgaattatacaaacggacgaaacgttcttattcaatggcggttgccgcgctggtcggcggttttgtgttcagttttttaaaaggattgaacatcagcgcgatctttattctgcctgtcgtcatcgtattgctggtgctgttaaagcggcagtttatcagagagcaggcatcgtatacgctcggccagatgatttttgcggccgctctgtttattatcgccttgtttaactacaatctcattgccggctttatctgggataaaatgaatcggctgctgcgccacgattatttcgttcataacaattcgcacattacatatgccacgatgacggccattattgttgtgccgctgtttttcctgttgtttacggtcttttatcataaaagatcgaagccgatcggagaaaaggccgaccctgaacggctgaagtcctttttggcggaagaaggcggaaacgccctcagccatctcggctttctcggggataagcggttttatttctcaagcgacggcaaagcgcttttattgttcggccagatttccagaaggcttgtcgtgctcggtgatccgtcaggacagagagactcttttccgcttgtgattgaggaatttctgaatgaagcgcataagcaggggctgagtgtcatgttttatcagatcgaacgtgaagatctggcgctgtaccatgacttcggctataacttcttcaagctcggagaagaggcgttcgtggatatggaagcatttacgctgtcaggtaagaaaaaagcggggctgcgggcgattaacaacaaatttgaccgcgaaggctacacatttcatgtcggggaaccgccgttttcctccgagtttatcgccaagctgaaagacatatcggacgaatggctcggaccgaaaaaagagaaaggtttttctctcggtttcttcgaccgggattatctggaacaggcgccgattgcttacgtgaaagacgcggaaggggagatcatcgcttttgccaacctgatgccgatgtatcaggaaggcgagatatcagtcgacttgatgcgttatcggaaaagtgcgccgaacggtattatggacgcgctttttatccgtctgtttctctgggcgcaggaaaaaggctataccacctttaatatgggcatggcgcctttgtcaaacgtaggaacggcttttacatctttctggtcggaaagaatcgcggccgtcattttcaacaacgtccggtatatgtacagcttcagcgggctgcgggcctttaaagaaaaatacaaaccggagtggcgcgggaaatacttggcgtaccgtaaaaacagatcgctgtccgtcacgatgattctcgtcacccgcctgatcggaaaaaccaaaaaaagacgccgttaaaaggcgtctttttttttgaagaattaactaaaaattctaattttactctgttatactgaataacatgatcataaggtgaaaggaaggctgatgaatgaaacaggcaaccgtgtttaaatatgaagcgtttaccgatattcctgttttgggaaatcccgcgggaatcgtctttaacggagatgattattcagatgaagagatgcagatgatcgccgaaatggcagggtacaatgaaacctcatttctctgcaaaagcggagaagccgatctgcgcatccgctattttacacccggccacgaaatgaatttatgcggacatgctaccgtcgcctctctttacgcattaattgaaaagggaaggcttcaggctgatcagacatatcaaattgagacaaaagccggtattcttcccgcaaaagccgctgaacgaaacggccgggtatacatcacgctcgaacaggcacccccgcaatttctgccgtttacgggagacaaagaaaagcttgcggcctcgctcgggattacggctgaggattttcacagcgagctgccgattgtttacggatcaacggggatctggacactgattgttccgctgagatcacttcaagcatcacggaatatggtgccggacaacgcacaattccccgctgttttgcgcgatcttccgaaagcgagcgttcatccgttttctctggaaaccgttcatccggaaagtgatctgcacggacgccatttttcttcccctttctccggaacgaccgaagatcccgtcacgggaaccgcttcaggcgttatggcggcctatatgcggcaatacggaggctctgaagccgaatgcctcacgattgaacaaggccaggaaatcgggaaagacggaaaagtggaaatcaggattacagaagataacgaaaagatgaaaatcgagatgacgggaacggccgtgtatgccgaatcaatcaattttcagcttccgtaacggtttacaaaagacggtcgtatccgttatattataaatgataatcattttcaattgaataggaaggtgaatcggcatgccgaaaaccgaacaactacagcaaaacgaaagtcttgcacatacaatcagaaacagaagatccatccggtcgtttaagccggaaaccgtaccttctgaagtcatattagatatgcttgaaacggccgtttacgcgccgaaccacagactgacggagccatggcgttttatctacgcagcaagcgaagcgggtaaagaaaagcttgcggacagctacgtctcatttttcaaaaaaataaaagatgatttcaacgaggaaaaagagcggaacatgagaaaaaacctcagcgccgttccgggatttttgcttgtcgtcttaaaagaagatgaaaatgaatttacgagaaacgatgatttcgcggcgctgagcggcatgattcaaaaccttcagctgctcgcacatgaaaacggcatcggcatggtctggaaaagcggccgcatcatgtatgacaaacaggtgcaccaagacttcggtctggcagacaatgagcgcttcgccgccatcattcaaacgggctatccggatgaacagcctaaggcgaaagaacggacgccggcaaaaagcctgtttaccgagttgtaaaaaaatccccgtctctatacagaggcggggatttcgtattagcgggttttgcttttagctctgttgtcagcggctttcatccgcgcctgcgcttcgcggtcagcggaatcagcaagctcgcttgaatattcctcgtacgtgccgtctgtttcgcgtttcaaagcatccggaacttgaggaagtttttgtttgtttttatcacggtttttgtgagtatgatttctgcccatatcaatcgccccctgaaaaaagtgatatcaaacaaacatagtatctgcccggccccgatctttattcagtttatttccgtttggctgctctttccgcttttttaaattcaccggaataaaggacttcctgcatttttttcagattggctccctgctgatgtttttcgcgcttcttttccataaaagaagaccctccttcaaaacagaataccaataggattggcttttatttccgtttttatgcagataagatatcctttaaagccaactcaagttcttcatacgtaaactgaaaaccggatgtcagcgcctgcttaggcagggcgcgctggccttttacgatcagcaggctcatttctcccaaggccttctccagaaaaaattccggtacgggaatccaatggggcggtgcaggacgcttgcgatcgtctttccgaattgcttcatttctacgggattcggcgatgtcacattcatgggaccggacaagtcatcatgctccgccgcaaaagcaataagttccgcggcgtcatcgacatgaacccatgacagccactgccgtccagagccgacggtgccgcccgctaacagcttataagggagaaccatgagcggcagggcgcctttttcaccgagcatcacgccgaatctggcatataccgtccggatgccgagcgcttcaattttctggccttcacgctcccacatatgagccgtatgactgagaaagtcttcatttgacgtatcggactgctcagtgaacgttttctctgtgcttgtgccgtaaatgccgacggcgcttgcctgaatcaaagcccggggttttttcggctgctgcttcataatccgtctgacttctctcgtcgcttctattctgcttgaaatgatttgttccttcgttgtgtccgtccagcggtcaaagatggatttgccggcgaggttcacccatacatcaatagggggaagctcgcgctcaggcgccgcgttttcggccagccattgaacatatgtcacatttttttgttcggtttctctctgttttcttgataaaatatagacatgatgtccccggcgggtaaacacacctgtcagatgccggcccagaaaaccagtgccgcctgtcatcgcgatattcatatccatctctccttacacgttgatacatatactgtacctcatttgccaaaaagaaaaacgcctgaacatcggggcggggaaggagaccgggatgccgtttattacaaaaatatcgacccaaaagaaaaataccgagcgcttcaacatctttcttgatgagaaatatgcattcagcgtcgacgccgacgtgcttgtgcgttttgacctgaaaaaagggaaagaactggacgagcttgacattcttgaaatccagcacggtgatgacgtgaaaaaagcctttaaccgcgccgttgaatttttatcatatcggatgcggtctgaaaaagaagtccgggatcacctgaagaaaaaagaaacaccggacatggtcatttctgaagtcatccataaactgtacgattaccgctacttaaatgacaaagaatttgccgaagcctatgcgagcacccacaaaaaaacaaacggcaaaggccctgacgtcctgttccgcgagctgaaagcgaaaggaatagacgacgataccatcaaggagacgctcagcgcgtttacatttgatgagcagatacaagaagcgctgaaacatatcggcaaaatcctcaaaaaagacaaaaagctgtccacaaaagagatcagacagcgggcgcagatgcagcttcagcgaaaaggtttccctttcgacgtcatcaatgccgctctggagcagacggagtatgaaaatgatgatgaagccgagatggaagctctgaaggctcatgcggaaaaagcgatcaggaaataccgctatgacggcagctatgaaagcggaatgaaggtcaaacagtacttattcagaaaaggattctcgattgacgatattgatcaattcttgcaggaagaggagtaaactgaaatggacaaacgatacagtcaaatgacgcctcatgaactacagacagaaattgcgggactgacggaaaaagcgcgtaaagcggaacagatgggcattgtaaatgaactggccgtgcttgaacggaaaattacgatggccaaagcttacatgctgaacccggaagactttcggcccggcggggtgtatcagatagaaggttctgatgacactttccgcattgattacatcaacggcgtattcgcctggggacacagatcttccccgtctgacggggaagaagcactgccgatttccgttttaaaagaaaaataataacaaaagaggccggttccggcctctttttcttttcgggcacattcgtttcaacctttcagtaaaaaatgattgaattcatttttgatatcttttaagatggaattcgttgttttttaataaaaaggaggcgatttgcgttgaatatcaaaatgaaacagccatctgtgaaattaatgatttttgttttaatgatttgcacattttccatcgggtatacggaatatgctgttatgggtattctgacgtcgattgccgatgactttcatatacatgtatcttcagcgggcatgcttgttacggcgtacgcggcaagcgtctgcctgacgggcccgatcgtaactattatcgcggttaagctgccgagaaagccggtgctgctagggttgatgggcatcttcgtgcttgccaacctgatgagcgtctttgcgccgaacttcgccgtgctggcgatttccagaattttatccgcatccattcacggagctttttttgcgatcgccatggtgtttgcaagtgaaatggtgccgcctgaaaaacgttccgccgccgcggcttccatgaacggcggattaaccgtggcgctgatgctcggcgttccgttcggctcttatttaggggatgcccttaactggcgggccgtctttttcattatttctgttttaggcctgatcgggctgatcggactgatgctggtcgtaccgaaccgaaaaccgaaagtgattccgatgctgatgaatgaatggagtgtctttaagcataaacaagtgattttttcctttgcgatcaccattctcggctactcaggcgtctttatcgcttacacgtttattgagccgattttaagagattcagcggggttcggcacagtcggcattacaggcgcattatttgcctacggtctcggcggagtggcggggaatttcttcgcggggaaagtgccgctcaaactgctgacgcgcacgatgatcggtgtgatgatcggcctgatcggcgtcttggcgatttttccttatatcgctgtttttcccgccgcagccgtttcagcgacatttttgttcggcgcatgtgcgttcggcacgccgccgcttttgcagaccaaggttatttcctcctctgaaaacggcacgacaatcgccgctgcggtgagcgtttccgcctttaacctggcaaacgcgctcggcgcctggatcggcggattgattctcgggggaacgggatcttactcatggctgtttgccggcggtgcgctgatgacggctctcggccttgtgctttccacgttcgctcatctgtctgagaagaaagatgtttatgaataccaagtgcataaaggataacaaaaagcttgcaggggatattccgcctgcaagcttttttcaatgtttcaacgtaatgctgatcaccgtatgtttatcgctctcagctaaggaaatattccgggtttccggtaccccgtctttttcaaaaacaacggcataggttcctttcgcgccgcttttccatgtcatctcaccgtggtgatcagtcttgcctattatctctccgcggtctatattcggctgatgatctgactccgccgctttcatcacggtaaccgtcacaccggccgccggtgaaccgtctgcattctcaacatggagcgtaacgggcagtgcttttttggcggcggaatcatccgctttgccgcatccgcataaaacggctgccgcgagaaagaagacaaaagctttattgatttgaccaatattgaatgttgtcgaatacactgtttgtcacccttgttcccagattgtaagacgacccgccgtttgtatgaatggcaatggcggtctggccggtgtcgctgtaattgcggtaaacgggcgatccgctctggcagccgaacgtatctgtcgtgtaagtgagtttatatgtctcggcagaacgtatcggcttgctgtccgaccacatggaaccggacactttgtcgcacggataccctgtcacggttgaggaaagcccggccggactggaactgttggtcgtccgatagccgtaccagccgacagtattcccgggcgacccgtttactttgattgcgccgtagtcatagtttgtgtcaccgttttctgtccaccctttgacactgtagaatgtcttgcctgaataagagtcgtacgggtacgatgacccgttgcggccgggagctgccgtaattttcgatgcccagccgtttttctgatcatacacgcaatgtcccgccgtaacgatcgtgtcagcattgacaaaaaaaccggtgcatccgtaggtgcttgtgctgccgctgtatgtaacggtcagctgtgctgtcgcgcgatatggaaatgatgttgtgggagaaattctgattcgttcgtctgtcccaataatactggaaggctttaatgacttgatgtcagctttgctgttttgtgcaagctgtcttttggtgaggcccgttccttcataagcgggggatgtctgtgttgtttgtacaggctgattctgatttgcgtcaaactcctcaccgctgtttgatacagatgtctgcgggctgcccgctgcttctgctgaaacagcaaataatgaaactgacagtaagaatgcggtaaggctcagcaatcgttttgaaactgtcttcattttataaaacccctccttttttgtctaccggcttgcggtttagcatttaacatattatggaatttatttagcgttatgaccgcaagaggatgtttttttccgcaaaaaaaagaccgggtcattcccggtctcttacggtgtgtgttatcgtctgcctgaagctctcatgcgctcttgcgggtgcgaattaattgaaccgtccgcccgtttagaagcgtagtcatcctttgcccgcggttcgccttcaaacttattattgttctgattaggaaatccttttgccttgttccggaccatttgttttccccctcggccaatatcaaaaggttgcgccttctggactgaagacgtaaagttagtatatgcctgtgacaagctgcgtaaaagcagcaggttttcccaaggaaaggagacagagacatgaatacatatatcgacaaactgacgaatttgctgcttgagaaaaatgacatgctcagctatttgcaagcgcggacttgggttgagcttttatggggagatttcgaagcgacttacgcaaaagccggccgcccgtaccaaggagagcaaatgacggaacgcgtcgtcaaggaatggatcgaatcatacggcagcaagctccatatgttccaaagcgttcgggaagacgtttctcattatttggatcaaagcaggggtctcctgcattaatatagcagtgcgcccgccggataccgtccggcggttttttctttttataaaagaaatgggaaaatcatgtttgacgaccggcggaatgtggaaatgtgtaataacttataaaatagcggggaggaaccacaatgaacatgaaaaaggggttaaccgcatttattccggccgcaggactttgcttatttttagccgcaggcaccgttttttttgatccggcagcgaatgccgcagcagttcatcagacaaaaatagacaccgcagcagatacatatatcgtgaaagcaggagaacttaacgtccgcaaagaacccaataaacaagggcggattatcggcacgcttcgttcagaggattccgtaaaggttaaacggcttcaaggagcagattgggctgaaattgactacaaaggtcacaaagcctatatttccacgcattttctgatgaagcagccggtgaaggcggtgaccgcgaaacaaaccgatttttatacgccgactttggaaaccggcaaaaaagggtctgttaaagcgggtgaaaccgtcaatgtgctcggctgggggttcagccatgacggaggatttgaccgtaaatgggcgtacgtcacatacgccgggaaagcaggttatgtaaaaacggccgacttaactcaaaagtaaagattcaggcgggcgaataagcctgctttttttctgaaacctttcgcctttcctttcgtaaaagatgaaaaggagagtgacggatatgataatggtaatcggcggccttctgatggctgcggccggcatttcagtcacgttttttccgccgaagtcgatcaacagcctgtacggatatcggacgaagcgctctatggcggatgagtcgcagtggaaagaaggcaatcgattcagtgcgctcctcatgattctgttcggccttatttcggcggcagctggatttgcgggcagcctgcttatccggctgactcagccgttcgccctgatcgttcaggccgtattgttgatcgcgatcagcgtactgatcatcgtcttaacagaaagaagattgaaacaaacggggaggagaatcgatgaatgacattacgtttcacatgatcgaaacaaacggagtgacgctgcacacggcttcagccggtccgaaagacggtcctttggcggtgctgctgcacgggtttccggaattctggtacggctggaagagtcagatcaaaccgctggcggatgccggataccatgttgtcgtgcctgatcagcgcggctataatctcagtggcaaaccggagggcattgaaaactataccattgatacgctcagagacgacattatcgggctgatcactcattttacagatgacaaagccgtcgtcatcggacatgattggggaggagccgtggcctggcatttggcatccacgcggccgcaaaacgttgaaaaattgatcacggtcaatatcccgcacccggcggttatgcggaaggtcacaccgttctacccgccgcagtggaagaaaagctcttatatcgctttctttcagcttccggaaaagccggaacggagattgtctgaagacgattaccgcgtattggatcacgcgatcggcttatctgaacgcccggcgcttttttcacgggaagatgtcgacagctacaaagaagcatggggcagaaaaggagcgctcacggcgatgctgaactggtaccgggcgatcagagccggcggtttaggccctgccgttccgcttaaaatgcccgttccgtaccggttaatatggggcgtcaacgaccgcgcgctgagcaaaaagctcgccaaggaaacaaaacggatgattccaaacggcgacttaatcttcatagatgatgcctcacattgggtcattcacgaaaaaccgcgcatcgtcagccatttgattcatgaataccttcagcaataaagtctgtcccgcgtacagactttttcttttttttctcatatctgccgaaaaacatgacaaaatataaatcatatgcagaaaaaaatttctttccctgtaacaaaaaaagggtttaaacgtcattaaaaaaaggaaaagccttactgaagttttgcggacaattcctttaaggccgtcctaaaaaaagaataatacaaagaaggtgccttcatgaaacaaaggttaatctcaattattattccgtcttacaatgaagggaacaacgtcaagctcatccatgaatctttaaaaaaagaatttcagacgattcattatgactatgaaattttctacatcaatgacggaagcgcggatgacacccttcagcagattaaagaactggccgccagaaaccatcgcgtcaaatacatatctttttcccgcaacttcgggaaagaagcggccattttggcaggatttgaacacgtgcagggcgaagcggtaatcgtgatggacgccgatctgcagcatccgacccatctgctgaaagacttcattcaaggctatgaagaagggtatgaccaagtcatcgcgcagcgcaaccgaaaaggggacagccccgtgcgttccgtgctttcttccctgtattataaatttatcaacaaagccgtcgaagtggacttgcgtgacggggtcggagatttccgcctgctgagccggcaggccgttgatgcccttttgaagctgagtgaagggaaccgtttctcgaaagggctgttctgctggatcgggtttgaccagaaaatcgtattttatgaaaatgtcgaaaggaagaacggcacgtccaaatggtcattcagcaatctgttcaactacggaatggacggtgtcgtctccttcaacaacaagcccctcagggtatgctttttcaccggtattctgatattgcttctgtcgatggtttatattgtaacgacctttgttcatattctgacacacggcgtgtccgtacccggatacttcaccattatttccgccgtgctgtttttagggggcatccagcttttgagtctcggcatcatcggagaatacatcggccggatttactatgaaacaaaaaaacgcccgcactatttaattaaagaagcgaatataacgtacggagaacaaaatgaaacgaattatacaaaaaagcgcaagtggaaccattaaacagccgccgctgtgcgcagggtctggggacgttgtatgaaaaaaaataaatggatcttgccggcagcctgtgtgctggctgcggcagccgctcatatttttttcttaaaagagtggtcggaaggccgctatatgacggggtctggagacgggatcgcccaaatggcggtcttcaaaaagctgctgtttgatcaatatatgaacggcaggctgttttacagctattcgttcggactgggcgggggagtgtacagtcagctcggctattatttctctacttcttttctattcctgtttatctccgccgctgtccgctttttgcagcttattcagctgacgggtgaggctgatgcgctgttttgggcgcaggcctccgtttttatcagcatcgccaagcagagtttcatcatattcacggcggcgtgtgtgttccgctatttcgtcaaacggacggtgcctgcttttgccggcgccgtgttgtacggggtctcgattatctacttccggcatgaggtgtattgggactttttcactgacagtatggtgtggctgccgctgctcgtgctcggcgcggaaaaaatcatcagggaaaaaaagccggcgtggtttatcttcgcctgtgcgctgacattgatcaacaacttttattttgcgtatattaatctgattttcatcggcatttatatcttattcaggtggatgatcccccttgaaggcaatgaggcgaaaaggctcgctcaatgcaggatatttattctgtcgggccttctcgggttcggcataagcgcagtttcctttatccctgtcgtatacggatatcttcataatctgcggccgccgtattcagagcaaattgcatggcttgatttttccgacaacattttattttcaagccggataatcattctgccggcggtttttttactttttctatttacattttctttatataaaaaccggctgttccggctgtttgcgggaatcagtctgctgtacattctgtttcacttcagtccgtttgcggcaagcgcctttaacggtttttcagctccgcaaaacaggtttgaatacgtcctgtgcttcacgattgccggaacggttgcagcagggctttctaagctttcagacatcagcatgaagagtatgctgatatccgccgtactcgccgttctgctctattggagccaagtgagacggttcagcctggatatttctgatcaggccaacctgcctatcctgctccttctggggctgaccattgccgctttccttgcagcaaagacaagactgaaaggcgcggtgtccgccgtctatgccgtcattctcttgacggcggtgctgacggctaatacatatgaaaaatatgcgttatcagaaggcgggaagatttatacggtatcgcatacctttatgacgggtcctgactataagggcaaagaacaaacagagcttattcagcgcctgaaagaaaaagaccctgatccgtttgcccgtttggattggatgaacggtgttttcaataacactccgatcatatacgggttcaacggattcagcgtatattcaagcatactgaaccgcaatctgctgtccttttactggaacgacctccggattgacatgggcagggaaagcgtcagccgttatgcgacattaggaaacagggctaatttatacagcctgctttacggaaaatattatatgacggaaaaaacaaacggggccggcgtgccgtacgggttcaaaaaaatcatggaatcatcccattatgcggtttatcaaaatcaatatatgcttccgttcgtacggacagctgatcgcgtatataacgaggacggtctgaaaaaagcgccctcccttgccagagaacgggcaatgcttgacgggatcatcacggaatcaagcgcagccaacacgaaaaaagcgcctgaggcgaaaaatatgatccgtcaggcaaaggtaacggccgaccatgcggattatcaagacggcatcctgacggtaaatgaagacggcggcggcctgatcattacgccgcaagccgctaagatggacggcggcgattattacgtcagcttttatttgaagaataaagcgaaggaccagggctttacattaaaagtgaacgattacacgacaacgagaaaatcgaatcaatccatttacaaaacaggtgtcaacgatcttactgtcagagtgccgaaaacaaaaaacatccaaatccgtctgccgaaaggatcgtatcagcttgacaggctggcgctttacgaagaacggtacgatacgctgaaaaacgcataccgaaaagcggaaaaagaaccgcgggccgatctcagatggcgcggaaatacgcttcatatctcgtatgaaaacaaaaccagcgcgccgtatatcatgcttccgattccatatgaaaaaggctgggagctgaagataaacggcagaaaagaacagattgaaaaagcggattattcctttatcggatttaaagcgcaaaaaggaaaaaacgatattcaattaacgtattacccgccgttttttaaacccgcggccgctctatcggtgatcagcctcgtgtttgccgcattatatgtgagaagacaaaaaaagcccggctcttaaacagagccgagctttaattttttctgcagtttttcctcgctgaaaatccagcccgtgtaggaagagagaagctctaaatcatgactgaggtggacgatggcgacaaaaggatagtggcctttgctccggtagcgcaaatcaataaagcgcacctcataatgatctttaaaagtatcgacctcccacctgtaaacgggggaaaatgaaagaaaggctgcaatattttcgtcctgtttcgcggccttcatcacatcggtttccggaacgggcacgcggttgaatgtatccaatatcacgacatggccgtcaaggcttctgccgacataaaaggcatgggccgtcgtcacggcgatacgccactgcctgaatttcatcgtcggcgaaataatgatggtttcaatctcctcttcaatcatttcgcgcagccttcgctttatccgcagctgcatcaaaaaccggacggcgtaatatcctgcaaggatgatataaagcatcagaaatgtcacgcccggatgacctccgatataccaaacggcaatcgcggccaaatggctgacgaaaataaacggatcaaaggtattgattaaaccgagagcgatccattttctcgaaaacgggcggatggcctgtgtgccgtacgcgttaaaaatgtcaacaaacacatgcaaaacgacagccagaagcgtccacagccacaggtgcaaaaagttcgcttccggataaaacataaacaaaatgcccggaatcagaacggaccaaaataatacggcgggaatggagtgcgtgaatcctctatgatttcgaatataaacggcattatttttcagcttcaatatggtatcaatatcaggtgcctgagagccggcaagcgcggcgatcataactgcctgagacattggggtgtgcatgccgacggcaggatcaagagttgcgattccgccaagcgcgatacccatgacaacgtgagtgccagtatccattgttgacctcctagcaggcgttaaaaatcagccgcccgcatatttcgcattataagatattccccattttctgtttgcccaatcatggcgtttatccgccgttctcatatgtttccgctttttctttatcactatttaatgtaacatattatcgtaacgtgcccttagtttacaccaaaatacagtgtcaagaaaagcggaacccgaaacatctgaggagaagatatgaacgcacttgaagaaaaaatgaaacaaaaagatatagacaaatttcgcgaggacttaattacatggttcgaaagagaacagagaattctgccgtggagagaaaatcaggacccgtatcgggtgtgggtgtcagaggtgatgctgcagcagacgcgcgtagataccgtcattccttatttccggcggtttgttgagcaatttccgaccgtttcggcgctcgctgaagccgatgaggaaaaagtgctcaaagcctgggaagggctaggttattactcccgtgtaagaaatctgcaaagtgccgtaaaagaagtacatgagcggtacgggggagtcgtccctgccggggaaaaggaatttggcggactgaaaggcgtcggcccttatacaaaaggcgccgtgctcagcatcgcatacaacaaaccgattcccgccgtagacggcaatgtgatgcgtgtcatgtcgagaattctttccatatgggacgatatcgcaaaacctaaaaccagaaccattttcgaacaggcggtatccgctttcatttctcatgaaaaaccatctgaattcaatcagggtttaatggagctcggcgcgatcatctgcaccccgaaatcaccgtcatgcctgctttgccccgtacaaaagcactgttcggcatttgcggaagggacagagcgggagctgcccgttaaaagcaaaaagaaaaagcccggaataaaaacaatggcagccgttgtgctgacagacgaacaaggcgatgtctatattcataaacggccgccaaaaggcttgctcgccaacttgtgggagtttccgaataccgaaacccagaaaggaatcaaaaccgaaagagagcagcttgaagcctatttagaaaaagagatgggaataaccgctgaaatcggggagctggaaggcatcgtagaacatgttttcacccatctcgtctggaatatttcggtctttttcggtaaagtaaaacaagtgtcggatacaacggaattcatacgggtcacaaaagaggagctcaaggaatacgcatttcccgtttcccatcaaaagatatggaaaatggcggaagaaagcggccgctaaaaagcgtcagtcatagctgacgcgagtgccgtggccgtaatccgcttcattccgtttcagtccgccgcgggcttcgatttcctgaatcagttcccggtatttggactggccttcttcgtttaaatacggcataatttgctggaaggcatgatggaaataggcgagctctgaatctctccaatcttgtttgggcatcatggccaattcgcccatatcacgtccgacatacatataaaagacccctttcaacagatattgcttttattgtttgttgaatgaaaagaactatacacagcaaggagctgaggaaaaatggaacaaaataaatgcgcactgatcacgggaagcagccgaggcgtcgggaaagcagccgccatcagactcgcggaaaaaggatacaatatcgtcatcaattacgcccgcagtaaaaaagcggcattagaaaccgccgaagaaattgaaaaactcggcgttaaaacgctcgttattaaagctaatgtcggccagccggcaaaaatcaaagacatgttccgccagattgacgaaacattcggcagactggacgtgttcgtcaataatgcggcttcaggcgtgctgagaccggttatggaactcgaagaaacacactgggactggacgatgaatatcaacgcgaaagcattgcttttctgcgcccaggaagcggcaaagatgatggagaaaaacggaggcggccacatcgtcagcatcagctcgctcggcagcatccgctatcttgaaaactatacgacggtcggtgtctcaaaagccgctttagaatcgttaacccgttatctggcggttgagctttctccgaaaaacatcatcgtaaacgcggtgtcaggcggagcgattgatacggacgcgctgaagcatttccctaacagagatgaactgctggaagatgcccgccaaaatacgccggccggcagaatggtcgagattaaagatatgatcgacacggtggagtttttagtttcttcaaaagcggacatgatccgcggccagaccatcattattgacggcggacgctctctgctcgtataagttttaaaaaaagatgaatagccttatcgtctcctgcgcattctaaagtgcgtggaggtgataacaatggcaaactcaaaatacagcaaaacagacgttcagcaggtgaaaagacaaaaccagcaatcagcttccggtcagggtcaatacggcactgaattcggcagtgaaactgatgcgcagcaggttagaaagcaaaaccaatctgctgaacaaaacaaacagcaaaacagctaatcactgaaacgaaaaagcacttcatcttcggatggaagtgcttttttctgttgctaaaacgacaaaacttgtgattcctctacagaatgagtcaaagggttttccggcgtaaaatcgaaatggtaaggagtatcaacctaaagcctaaggaggaacccgatgtcagagtttgaaaagcttgtaagtgaacagatgaaaatcatggatcagcttctcgagctgcagtcagaacttgaccgctgccggcaggtggaagcggaactcatcagtctggaaagagatgcaaagctggacaatgtacaggacgaaattgcgacaaagcgaaaagacctggccggcatacaggagttattccaaaggcagacagagcaagtcatccagtcttatcgcagcacggaaaagccgtcttcctatgtgcagaaatgaatgtgccattccggaagcggagtggttcttttattttcattttttaattcgtaacgttataatagtgaaaagacttgtcggaaagcaattgcggctgcattgactgcagggctttacagaaagtaggggagaaatatgggatatcccaaggaaggagaaaccattcaaattcacagctataagcataacgggctgcttcatcgaatttggaatgaaacgacgattttaaaaagtacggaattgtgtatcatcggagccaacgaccggacaatggtgacggaatccgacggacggacgtgggtgacgagagagccggcgatctgctactttcatgcccgtcagtggtttaacgtcatcggaatgctgagagatgacggggtacactattattgcaacatcagctcgccgttcgcttatgacggagaggccatcaaatatattgattacgatttggatgtcaaggtgtttccggatatgacgtataacattcttgacgaggatgaatacgatgaccaccgcaaatcaatgaattaccctaaagagatcgacagcattctgaaggagtatctgaatacgctgctgcattggattcatcagcggaaaggaccgtttgctccggaatttgttgatatgtggtatgaacggtatctgcgctatacaaaataaagaatacaataaaaaacctgttggggtgtcaacaggtttttcacatgggctcacacgccttaaagagagagggggataaagtgtgggcgtaatcagacgctatatgcaatttgtaaaaccttataaaaaacaaatttttatcacagtgttaatcggcattataaaattctccatcccgctggctctcccgcttctgttaaaatacgtggtcgatgacattattcaagggagcggaacggcaagcgctaaaacatcatcgctattcacgataatgggcatcatgttcgtgctgtttttaattctgcgtcccccggtagagtactatcggcaatacttcgcacaatggacgggcagccgggtgctctacgatatcaggggggtattgtttgatcatattcagaaattgagcctgaggttttatgccaacacgagaacgggcgaagtcatttcccgggtgataaatgatgtcgaacagacaaaagactttgtcataacgggactgatgaatatctggcttgatatgatgacggtgctgatcgtcatctgtattatgtttacactcgatgtgaagctgacattgatatctgtcattttgtttccgttatacggaatttcagtgaaatacttttacggccgtctccgaaaactgacacgtgagcgttctcaggcactcgcccaagttcagggacatttgcacgaaagagttcaggggatgcccgttatcagaagtttcgccattgaagattatgaacaagccaattttgatgaaaaaaacggacattttctggacaaagcgatccgtcatacgaattggaacgcgaaaacgttcgcagttgtgaataccattacggatttggcgccgctgcttgttatcgcgtttgcgggttattttgtcataaacggcccgctgacggtagggacgatggttgcgttcgtcggctatattgacagaatgtacaatccggtcagaagattgatcaactcatcgacgacgctgacccagtcgatcgcttcaatggatcgcatatttgaatttatcgacgagccgtatgaactgactgataaaccgaatgcattaaaagctgacggcattaagggtgaagttgaattccgaaatgtctcgttccgttatgaggaaggaaaagaaacgattttgcaggacgtttccttaaaggtgacaaaaggggaaaccgtcgcgctcgtcgggatgagcggcggcggaaaatcgacgcttgtcagcctcataccgcgtttttatgatgtatccggcggcagcctgctgattgacggcacagatattcgcgattatgaagcgagaagcctccgcaatcaagtcggaatggtgcttcaggatacgtttctgttcagtgagacgattcgtgaaaatatcgctatcggtaaaccgggagcgtctctggatgaggtggttgcggctgcgaaagcggcaaatgcccatgaatttattatgaacttccccgaaggctacgaaaccaaagtcggcgaacggggcgtcaaattgtcaggcgggcagaagcagcggatttcgatcgcccgtgtattcttaaaaaatccgccgctgctgatcttggatgaagcgacatcggctcttgatcttgaaagtgaacactacattcaggaagcgatggaaaagcttgcgaaaaaccggacgacttttatcgtcgcccacagactgtccacgattacgcacgcggataaaattgtcgtcatggaaaacggcgccgtcgtcgaaaccggcacgcacgaggaattaatggcccaaggcggccagtacagacacttatttacgattcagaatttgaactgatacaaaaacgtatgccgtccgaatgggcggcatacgttttttgaatgcaaaaaaacccggttttacggaagcaccgggttactcttcgtctgtttctaattcgctgtctttcgggtggtatgtctgaaaactcgtaattagcgtatcgagatgctccagctgctcgcggtattccgcaaccgcagccataatgctgagcatattgtaatcaagcagttcatcctcgcagttctgctgatttttcaagaaagacttcgtcaaaagctgtttatatcttatgctttcttcagcatcgtcatcatgcggtttgatcttgccgaccgtccgcatcagaatcctttcgtgccaatgaagcagataatcaatttcttctgtcagcgtctcctgaaattcctccggcatatgataaatctcgttttcatagcggtgcagctttttcagcgtatcaagcgcccgatttgccgtaataatcgcctgtctgaataaaacaagcttgcgcgactttacatacgtcgttttcttaaagtagcttctctcctctttataaagaaggtacgtatgatcaagcttcatcattttttccttcagcttctcaatatcctctttcaatatcgagtgttccgtagactgacgcatcgtcagcctgatccatttcatgatctcatcggtatattcaaccgtatgatgagtcagcttcgtttcgtatttcggcggaagaaacacaaggttcacaataaaagaagacagcacgcctaaaataacggtgcttgttcgtatcagagcgaacgtcaggaagctgtttcccggtgtttctaaaatcgcgataaccgtcacgagcgcaatcgaaatggtgtgttcaattttcagttttaacatgatcgtgatgacaatcactgcggtcaatccgatcataatcggactcggtccgaaaatcagtccgaataccgtagcgatgacagcgccgatgatatttgcctgaacctgatcaataatgataagaaaagacctgtaaatagagggctgtatggcaaatatagctgcaatcccggcaaagatcggcgacggaagtccgatccatgatgctaagtagagcgcgagcgtaatcgcaatccctgttttaaaaatgcgggcaccaagtttcattggtttgtgcgtgcattcctttctctaataaattatgtgccgaacgaacggctgacacttacatttccctgtcggctgatttgctaaacaataaagtaatatacagggatcataccaattattcaaggtctttttttgaaaaaaccattatctcacaaatcggacaaaaagaaaaagcggaagccccgggctcccgcttgtttcagaagttattttttcatatgtctgaacgcatcttcaacggcttgtaaagtggcgtcgatatcctcttcagtatgtgcggttgtgataaaccaagcttcatacttcgacggagcgagattgatgccgcgttcaagcatcagcttgaagaacttggcgaatgcttctccgtccgtattttccgcctgctcgtaattgacgattttttcatcagtgaagtaaaccgtgagcgcgccttttaaacggttgacggtgatggtaatgccatgtgtctccgcatgggcgagaatgccttgctcaagtctggcgccgagctcatcaagccgctcgtaaacgccttcttccttcagcacttccaggcaggcgatgcctgataggatagatgccgggtttccggccatcgtgccggcttgatatgccgggccgagcggagcaacctgctccatgatctcttttttgcctccgtaagcgccgatcggcaagccgcccccgataattttaccgagcgccgttaaatcaggcttcacttgaagaagatcctgcgcgcctccgtacataaaacggaacgccgtgatcacttcatcataaatgacgagcgcgcccgctttatgggtcaattcatttacctgttctaaaaatccttcttcaggttcaacgatgccgaagttgccgacgatcggctcgacgagaaccgctgcaatttctgaaccccatttatccagcgcggctttgtagctttcaatatcattgaaaggaacggtaatgacctcattggcgatgcttttcggcacgccggcggaatcaggggtgccgagcgtagacgggccggaacccgcagcgacaagtacgagatcagaatggccgtgatagcagccggcgaatttaatgatttttgtgcggcctgtataagcgcgtgcaacccggatcgttgtcatcaccgcttcagtgcctgagtttacgaatcgtactttatcaagtgaaggaatggcctccttcagcattttggcgaaagtgacctcatgtttggtcggcgtcccgtacagcacgccgttttccgccgctgttttaatcgcttcagtaatatgcggatgggcatgtccggtaataatcggaccgtaagccgctaaataatcgatatactgattcccgtctacatcccagaaataagcgccgttcgctttttccatcgcaacgggtgaaccgccgcctaccgctttataggatctggacgggctgttcacgcctccgacgatatgctctaacgcttccttatgaagttcaactgattttgtatacaaaaaatgaccctcctaatatctccttacatcatgttctattgtagcatgcttcattgcgagcacaacgggttcatgcttccagaaaagagccgggggataacggttgtaatcttaacgtgaattggatacgcttaataaaaaacccggaggtataagaaatgacgattgaaatcggacaaacagcaccggatatgaaattagtgaatgacagcggggaagaagtagcattgacggattttaaagggaagtacgtcgttctctatttttatccgaaagacatgacacccggatgcacgacggaagcatgtgatttccgtgatcagcacgaaagtttcgcgggacttgatgcggttatcatcggagtaagccctgacagccgtgataaacatgaaaaatttaagcaaaaacacgatcttcctttccagctcctcgttgatgatgagcacaaactggcggaagcttttgatgtgtggaagctgaagaagaattttgggaaagaatatatgggtatcgagcgatccacttttttgttagacaaagaaggccgtcttgtgaaggagtggagaaaggtaaaagtgaaagatcacgttgccgaggcgcttcgtgaattggaacaaattgcgtctaattaatggacaaatgctgaactcacggggttttcttcagattacatttgacaggagaccggaaaaagatgtacactaattataaacattataaagtaagaatcttttttagaagagaggtgcatgacggatggctgcacatgaattaaaagaagccttagacacgttgaaggatacgggagtccggattactcctcaacgtcatgccattctggaatatctcgtggattctatggcacatccgacagcggacgatatatataaagccttggaagggaaattccctaatatgagtgttgcgacagtgtataacaatttgcgtgtattccgggaagcggggcttgtaaaggaactgacgtacggagatgcgtccagcagatttgactttgtcacctctgaccattatcacgccatttgtgaaagctgcggaaaaatcgtggacttccattatcccgggcttgacgaagtggaacagcttgctgctcacgtcacagggtttaaggtaagccaccaccgtttggagatttacggcgtctgccaagaatgttccaaaaaagaaaaccactaaacgaagctgaccgctttgatacggtcagcttcgtttattttacactgttttttctgttataagactcatcgaacgctttgccttccaatcctttatccaatgtaagcggctctctgcaatgcatgcacatatccactctgcccagaatcttcgtttctttctcgcaagcggggcacatcacccggaccgcttttgtggacagcatgccgatccaaaaataaacggcggtgctgagtccgatcgacagcaggccgagaatcataaacaagctggcaagcaaaacagactgcttaaagaacagcccgatgtacataatgataaacccaacgaaaaccaaacttaacgcaaacgttctgatcttattaattttgcttgagtatttcgccatgtccatccccctctcgtttaactatagcacaaaacatatggcatattcttcatgttttcgtaagaaaagggaagaataaatatggcacctgaaaggaaatttgttataatagtgcaatgtgtttagaaaaaaggactttcatgttttatcatagaaatgtagaaacaatagctagtgaaacaatcgcattggaggaatcgtaatggacaatcttctccgtccaatttaccaagaaagagcaagtcatcccgatacgctggccgtccttatgattgagagaaggagtaaagcatcatccatcacggataactttgatgcggtcatgcttgtcattgtgaaacaggctgatgaacctctttttataaagcattatgaattcgaacacaaaaccgcttctttacatattgtaacggatgctctgcttcaggaatggattctgcttgggacaaatagaagagtcatagattggatcatcaacggcaaagtgctgtttgaccgcaatgaatatatatctgaactcaatgaccggctcagcacttttcctttcgccgagcggaaattaaagatcggaatggaatacggcaagctgatcagaagatttgtagaaggaaaagcgttttttgaagctgatcattttctggatgcatattatgcggtagtgcacgctcttcaccacttggcccgcatagaagtgattgaccgggggttttatcccgaaacgacagtctggaaccaggtccgtcacattgagccgcaggtatataagctatattccgaacttgtcgagagtcacgaaagcttggagaaaaggctcgaattattattcttagcaaatgattttctcatccattcaaaagctgaaatcggttctgcgcacctttttcaggtgatgaaagaaaaagaaatgtggcagtttggagaattgcttcagcaccctgaactggtgcacttcacccaagatctcggtgtcatgcttgattacctgacggaaaaaggctttgttgaagtatctcaaatagagaccaaagggcaggaagtatatcatcgaggatattctttcaaaaaaagtgttgacgctgaatcataggcatggtatattattaaacgtcgctgatgcgcttcaccaaaaagctcacagcggcggagaaataaaaacaaaaaaacatttgacagcaaatcgctgaaatgttatactgaaaaagtcgcctcgagatgaggttgagatgatctttgaaaactaaacaagacaaaacgtacctgttaattcaaagttttaaataaatcgcacagcgatgtgcgtagtcagtcaaactactttatcggagagtttgatcctggctcaggacgaacgctggcggcgtgcctaatacatgcaagtcgagcggacagatgggagcttgctccctgatgttagcggcggacgggtgagtaacacgtgggtaacctgcctgtaagactgggataactccgggaaaccggggctaataccggatggttgtctgaaccgcatggttcagacataaaaggtggcttcggctaccacttacagatggacccgcggcgcattagctagttggtgaggtaacggctcaccaaggcgacgatgcgtagccgacctgagagggtgatcggccacactgggactgagacacggcccagactcctacgggaggcagcagtagggaatcttccgcaatggacgaaagtctgacggagcaacgccgcgtgagtgatgaaggttttcggatcgtaaagctctgttgttagggaagaacaagtgccgttcaaatagggcggcaccttgacggtacctaaccagaaagccacggctaactacgtgccagcagccgcggtaatacgtaggtggcaagcgttgtccggaattattgggcgtaaagggctcgcaggcggtttcttaagtctgatgtgaaagcccccggctcaaccggggagggtcattggaaactggggaacttgagtgcagaagaggagagtggaattccacgtgtagcggtgaaatgcgtagagatgtggaggaacaccagtggcgaaggcgactctctggtctgtaactgacgctgaggagcgaaagcgtggggagcgaacaggattagataccctggtagtccacgccgtaaacgatgagtgctaagtgttagggggtttccgccccttagtgctgcagctaacgcattaagcactccgcctggggagtacggtcgcaagactgaaactcaaaggaattgacgggggcccgcacaagcggtggagcatgtggtttaattcgaagcaacgcgaagaaccttaccaggtcttgacatcctctgacaatcctagagataggacgtccccttcgggggcagagtgacaggtggtgcatggttgtcgtcagctcgtgtcgtgagatgttgggttaagtcccgcaacgagcgcaacccttgatcttagttgccagcattcagttgggcactctaaggtgactgccggtgacaaaccggaggaaggtggggatgacgtcaaatcatcatgccccttatgacctgggctacacacgtgctacaatggacagaacaaagggcagcgaaaccgcgaggttaagccaatcccacaaatctgttctcagttcggatcgcagtctgcaactcgactgcgtgaagctggaatcgctagtaatcgcggatcagcatgccgcggtgaatacgttcccgggccttgtacacaccgcccgtcacaccacgagagtttgtaacacccgaagtcggtgaggtaacctttatggagccagccgccgaaggtgggacagatgattggggtgaagtcgtaacaaggtagccgtatcggaaggtgcggctggatcacctcctttctaaggattttaacggaatataagacctcgggtcttataaacagaacgttccctgtcttgtttagttttgaaggatcattccttcaaaacataggaacacctgctaaatgcgccacttcctgtggcaacgcatgtgttagcatgtcctatgcgttgttctttgaaaactagataacagaagtaattcacattcaattagtaatgcaagatatcacgtagtgattctttttaacggttaagttagaaagggcgcacggtggatgccttggcactaggagccgatgaaggacgggacgaacaccgatatgcttcggggagctgtaagcaagctttgatccggagatttccgaatggggaaacccaccactcgtaatggagtggtatccatatctgaatacataggatatgagaaggcagacccggggaactgaaacatctaagtacccggaggaagagaaagcaaatgcgattccctgagtagcggcgagcgaaacgggaccagcccaaaccaagaggcttgcctcttggggttgtaggacactctgtacggagttacaaaggaacgaggtagatgaagaggtctggaaaggcccgccataggaggtaacagccctgtagtcaaaacttcgttctctcctgagtggatcctgagtacggcggaacacgtgaaattccgtcggaatccgggaggaccatctcccaaggctaaatactccctagtgaccgatagtgaaccagtaccgtgagggaaaggtgaaaagcaccccggaaggggagtgaaagagatcctgaaaccgtgtgcctacaagtagtcagagcccgttaacgggtgatggcgtgccttttgtagaatgaaccggcgagttacgatcccgtgcaaggttaagcagaagatgcggagccgcagcgaaagcgagtctgaatagggcgaattgagtacgtggtcgtagacccgaaaccaggtgatctacccatgtccagggtgaagttcaggtaacactgaatggaggcccgaacccacgcacgttgaaaagtgcggggatgaggtgtgggtaggggtgaaatgccaatcgaacctggagatagctggttctctccgaaatagctttagggctagcctcaaggtaagagtctcggaggtagagcactgattggactaggggcccctaccgggttaccgaattcagtcaaactccgaatgccgatgacttatccttgggagtcagactgcgagtgataagatccgtagtcgaaagggaaacagcccagaccgccagctaaggtcccaaagtatacgttaagtggaaaaggatgtggagttgcttagacaaccaggatgttggcttagaagcagccaccatttaaagagtgcgtaatagctcactggtcgagtgactctgcgccgaaaatgtaccggggctaaacgtatcaccgaagctgcggactgttcttcgaacagtggtaggagagcgttctaagggctgtgaagcaagaccggaaggacttgtggagcgcttagaagtgagaatgccggtatgagtagcgaaagaggggtgagaatcccctccaccgaatgcctaaggtttcctgaggaaggctcgtccgctcagggttagtcgggacctaagccgaggccgaaaggcgtaggcgatggataacaggttgatattcctgtaccacctcctcaccatttgagcaatggggggacgcaggaggatagggtaagcgcggtattggatatccgcgtccaagcagttaggctgggaaataggcaaatccgtttcccgtgaaggctgagctgtgatggcgagcgaattatagtagcgaagttcctgattccacactgccaagaaaagcctctagcgaggtgagaggtgcccgtaccgcaaaccgacacaggtaggcgaggagagaatcctaaggtgatcgagagaactctcgttaaggaactcggcaaaatgaccccgtaacttcgggagaaggggtgctctgttagggtgcaagcccgagagagccgcagtgaataggcccaggcgactgtttagcaaaaacacaggtctctgcgaagccgtaaggcgaagtataggggctgacgcctgcccggtgctggaaggttaagaggagcgcttagcgtaagcgaaggtgcgaattgaagccccagtaaacggcggccgtaactataacggtcctaaggtagcgaaattccttgtcgggtaagttccgacccgcacgaaaggcgcaacgatctgggcactgtctcaacgagagactcggtgaaattatagtacctgtgaagatgcaggttacccgcgacaggacggaaagaccccgtggagctttactgcagcctgatattgaatgttggtacagcttgtacaggataggtaggagccttggaaaccggagcgccagcttcggtggaggcatcggtgggatactaccctggctgtattgaccttctaacccgccgcccttatcgggcggggagacagtgtcaggtgggcagtttgactggggcggtcgcctcctaaaaggtaacggaggcgcccaaaggttccctcagaatggttggaaatcattcgcagagtgtaaaggcacaagggagcttgactgcgagacctacaagtcgagcagggacgaaagtcgggcttagtgatccggtggttccgcatggaagggccatcgctcaacggataaaagctaccccggggataacaggcttatctcccccaagagtccacatcgacggggaggtttggcacctcgatgtcggctcatcgcatcctggggctgtagtcggtcccaagggttgggctgttcgcccattaaagcggtacgcgagctgggttcagaacgtcgtgagacagttcggtccctatccgtcgcgggcgcaggaaatttgagaggagctgtccttagtacgagaggaccgggatggacgcaccgctggtgtaccagttgttctgccaagggcatcgctgggtagctatgtgcggacgggataagtgctgaaagcatctaagcatgaagcccccctcaagatgagatttcccattccgcaaggaagtaagatccctgaaagatgatcaggttgataggtctgaggtggaagtgtggcgacacatggagctgacagatactaatcgatcgaggacttaaccaatttgaatgtatgcttactgttatctagttttgagagaattttttaaaaaaactcttgctttttccgaaatacatagtataataatacatgtcactaaaacgtctggtgatgatggcgaagaggtcacacccgttcccatgccgaacacggaagttaagctcttcagcgccgatggtagtcggggtttccccctgtgagagtaggacatcgccaggcagacttcattccgcagtagctcagtggtagagctatcggctgttaaccgatcggtcgtaggttcgaatcctacctgcggagccaattatggagagctgtccgagtggccgaaggagcacgattggaaatcgtgtaggcggtaaccccgtctcaagggttcgaatcccttgctctccgccactaattatcaatacataacaaacgaaaaaataccagggcccgttggtcaagcggttaagacaccgccctttcacggcggtaacacgggttcgaatcccgtacgggtcacttatatgatggaggattagctcagctgggagagcatctgccttacaagcagagggtcggcggttcgagcccgtcatcctccaccattatcatcgcggggtggagcagttcggtagctcgtcgggctcataacccgaaggtcgcaggttcaaatcctgcccccgcaaccaaaaaaatggtccggtagttcagttggttagaatgcctgcctgtcacgcaggaggtcgcgggttcgagtcccgtccggaccgccatttataaaaaggctcggtagctcagttggtagagcaacggactgaaaatccgtgtgtcggcggttcgattccgtcccgagccaccatttgccggtctagctcaattggtagagcaactgacttgtaatcagtaggttgggggttcaagtcctctggccggcactctaaatgatggaggggtagcgaagtggctaaacgcggcggactgtaaatccgctccctcagggttcggcagttcgaatctgcccccctccaccattttataaataggggcatagtttaacggtagaacagaggtctccaaaacctccggtgtgggttcgattcctactgcccctgccactatattatttattcatcttcagattatggcggttgtggcgaagtggttaacgcaccagattgtggctctggcactcgtgggttcgattcccatcaatcgccccatattatcattgggctatagccaagcggtaaggcaacggactttgactccgtcatgcgttggttcgaatccagctagcccagttgcatttttttgaaaacaacagcataagatgtattaagttcttttacatgttgcggaagtagttcagtggtagaacatcaccttgccaaggtgggggtcgcgggttcgaatcccgtcttccgctccaaattacggcggcatagccaagtggtaaggcagaggtctgcaaaacctttatccccggttcgaatccgggtgtcgcctttctattgccggggtggtggaattggcagacacacaggacttaaaatcctgcggtaggtgactaccgtgccggttcaagtccggccctcggcaccaatttaactttgagcgaattatgttaaattggtcatcaattttcttattataaaacatatatgagagtgatttgcatattgcaggtcgctttttttatataataaaagcgtgaagactatcaatataagtttcttgcttgtatcgtatatactgcattaccatttgaaaaaactttactaaaaccattgactctttatagaatgcatgttatatttatatacgtcggttgaacacgacgcattatatgccggtgtggcggaattggcagacgcgcacgactcaaaatcgtgttccttctggagtgccggttcgaccccggccaccggtatacaaaggcttctacatattgtagaagccttttttgttgtatgaaaatatctccaaggcttgtgaaaacatgatacctgcagtaggaggagctggattcggcgcaccgtgcttatattaaggaaacaccgattcggccgtggagttaaatctttccgatcgggctgtttttgctattaacactgtttctcagctggtggggcggccattcaaaagcgcgcattattggcagcggttattgcagtatttgctctttttatgtttcagcgctttcctgcaggcgagcttgttacccattttattaagggcggaaacgaattggtcaacgttattattatgttatcgctgatttgggccgtaacagcagtagctgaaaatctgggattctcgaaatatgttacttctcatttaacatcatggagccctcatatgtttattgcgccgtctctttttatactgggggctgttatatcccattttatcgggtcatcctgggggacttggggcgctcggcgtaacgctggcggttcagttacataccagcttattattagcgagcggaacatttggtttgcttctcccctcagtgataatacggtgttggggatcaatgttgcgaagtatgcccgttcgaagcttgttccggcgattaacgccgcggggatctccgttgtgttatacggtgcgtatttttcagataacaaatactttttgaaggcgttatccgaaattgagataacgcctttttaatgagctgttatacttgagaaaaaaagaagtgatgacattgaagcagattattgcaatgggcggcgggggttttccatggagccggatcatcttgtgctggatcagtatattttagagcagtcggcgcggtcaaagccgaaagtttgttttttgccgacggcaagcggagattcggagaaatataccggcaggttttatcaggcctttcaaaagctgcggtgtgagccggatcacttgtcgctgtttaaaccgccgggttctgatctcagatcctttctcatgaagaaagatattatatatgtcggcggcggaaatacgcgcaatatgcttgtcttatggaaagagtgggggcttgaccttattcttcgtgaggcttgggaaaacggcatcatcttagcgggtctcagcgccggagcgatttgctggtatgaagaaggggtgacggattcagcgggggatttgcgagagttaacagctttaggatttttgccgggcagcttttgtccgcactatgacggagaagcggagcgccggccggtgtatcaccgtctgatttccgaaaagatactcagggagggctatgccgctgatgacggcgctgcgcttcattataaagacggtcagctgttccgggctgtctcttcccgggaaaccgcaaagggttatcgggtttttaataccgaagaaggcgttcgggaaacagagcttatgaccattccgttatctgaattttgataatatgcttttttttgtacacaacttatgttacgatgagagcgaaatcaatagttactgggggtgcccgtctgagcgggctgagagagaagcggcggcttcttaaccctttggacctgatctggttcgtaccagcgtggggaagtaaaggttttattattgttgaggaaaacaataatagtttctttctgactgcaaaaccgggttcttctttgaacccggtttttttgtgctggtgctgagcttggttctgttattcaaatgataaaggagagatttgtatgcaaaatcaatcagtacagcaagcgaacatttccattatgtcgagtttttccggcagtaaaaaggtttatgcagaaggttcttcgcccgacatacgagtgccgatgcgggaaatcagcctgagtgcgactacgggggcattcggggaagaggagaatgcgccggtccgtgtttatgatacgagcggaccgtatacagacccggatgtacagattgatattcatgaaggtctgggggcgctccgcacaaagtggattaccgggcgcggagaagtagaagaatataacggccggaccgtgagacctgaagacaacggctataaaaaagaagatcatgctgccgaataccccggcctgcagcggaaaccgcttcgggccaagccggggaaaaatgtaacacaattgcattatgcgagaaaaggcatcattacgccggaaatggagtttatcgcaattcgcgagcatgtgtctcccgaatttgtcagagacgaggtagccagcggccgggcgattattccttctaacgtcaaccacccggaaagcgagccgatgattatcggccggaattttcatgtgaaaattaatgccaatatcggcaactcggctgttacatcttctatcgaagaagaagtcgaaaaaatgacgtgggcgattcgctggggcgctgatacgatgatggatttatccacgggaaaagacattcatacgacgcgtgaatggattatccgcaactgccccgtgcctgtggggacggtgccgatttatcaggcgcttgaaaaagttaatggcattgccgaggatttaacgtgggacatttatcgtgacacattgattgagcaggcggagcagggcgtggattatttcaccattcatgccggcgtactgcttcgttatgtcccgttaacggctaaacgcacgacgggaatcgtatcccgcggcggggcgattatggcgcaatggtgcctggctcatcatcaggaaagctttctgtacacgcattttgaagaaatttgtgaaatcatgaagagctatgatatcgctttttcacttggtgacgggcttcgtccgggttcgattgcggatgccaatgatgaagcgcagtttgcggaattggagactctcggagaattgacggagattgcgtggaagcacgatgtgcaagtgatgatcgaaggaccgggtcatgtgccgatgcataaaattaaggaaaacatggacaagcagctggaaatttgtaaagaggcgcctttttacacgctcggcccattaacgacggatatcgctccgggctatgaccacattacttcagcaatcggcgcggcgatgatcggctggtacgggacggcgatgctttgctatgtcacgccgaaggagcatttggggctgccgaatcgtgatgatgtaagagaaggcgtcattacgtacaaaatcgcggcacatgccgcagaccttgctaaagggcatccgggtgcacagatccgtgacgatgctctgtctaaggcgcggtttgaattccggtggcgtgatcaatttcatttgtcgcttgatcctgaaagagcaatggaatatcatgatgaaacgctgccggctgaaggcgcaaaaacggctcacttctgttcgatgtgcggcccgaagttctgcagcatgagaatttctcaggatattcgtgattatgcgaaggaaaacggacttactgaagacgaggccgtcaatgaagggctgaaagaaaaagcaaaagagtttgcagagaagggaagccgcttatatcaataaaagaaaagatgaagatggagtgtatccatcttcatcttttttagaaaaacggtgaacggcgaagcggcggaatgctctgctcgaagcggaatatattttccggatcatatttcgttttgacttgacggaggcggtgaacattttctccgtaatacgtttgcagccagtttctgatttctctatcaggccaattcacataatctcccatcgtttctcttgatagggacgttctcagtccttcgatccagcggacattttgtctttcttcttcagcagatgtccaagttgtaatatattcttgggcaatgattgcgttgcgatagtagaatgccgtttggtccggagcgatccgtccggccgccccgccgagagattgctgccagacactggcgttttcgttcggagcgtgctctaaatagcgctttaaagtggatattgcgcgtgttgataatggtttttcaataaaggatcctgaccgcttcatcttttgcggctgattgcctcccgggctgttaaaaaaggctgctgctttaataaatggcactgtcttgaccatgccgcttgtcggttttcccgctttcattaacggagccagcagttctttcagctcctcttttgtcccggtaaattgaccgagtgcttctatgcggttgacttccttaggccaaaactgaattgatgaggtaagccggttgtctgtaaatggagcccagcgctgccacgtattaaatacttcctcgaaatcatcccagccccaagtgacagaaaaaacagacacgcacgagatcggcacggctttaaacatcatggatgtgacaatgccgaagttgcctccccctccgccctgagatgcccaaaatagatcagagtgctttgagcggttgactgtgatcaagtcagcacccgctttttcgtccgctatgatcatttcgagctggaggagacgatcgcaagtaagtccggcagtccttgttaaatatccgattcctcccccgagcgtcagccccgtgattcccacattcgcaatggttcccgcaggaagggtcaagccgtaccgccagagtgtccggtagacttcccctaattcggctcccgcttcaatcgagaccagccgcttatcctcatttactcttattttcttcatttcactgagatcaatgactagtccgtcatttaacagggaaaaattttcgtagctgtgtcttccgcctctgatacggaaaggcacattgttctcacgtgcccatctcaccgcattgagggcgtcatgtttgttttggcaaaacacaatgatgtctggatatctttgcaggcttaaattgaaattggttcttgcggcattatagtccgggtcatcttttttgacgatgcgaccgctcaatgttgtcttttccacattctcactcactttcacttgtaatctgctatgttttctagcatatgcggaaaaatgagagagtgtatgaggaaaacccccggaaggacacgatattttaaattgtagttgacaggtagggattgtatgaattaacataatcattacatatttccaaacgatggctgatcggatcaccgaaggctcttatctattaaacagataagggccttttttgcgtgaaagtcattaaatgaaaagcggagggatgaaaagtggcgttaaaaaaggtatcacatgtgcgcaaaaagagaaaaaagcggaaaaagtacagaaaacacacattgaatttcgaactgcttgtagagaaaaacaaacgggagattatgagaaatgaggaacagatggagcagatttatataaagatagatgaaaagcatgcgggggttcgataaagatgaaggagagaaaatggaggttgaaaacaacggtactcgcgctgtcggtatccatcatgttatcagggtgcgcgttagggagtgccggggaagaaccgtcatctgcggctgataaaaaggaagaaacacgtatcacccatgtcaagacaaaggaatttaaagcttctcatccggcggcgattcccgctaaatcgaaagccagaactgacacttttgttgctgggatttccgcgccgggcggcgtgtttctgccgtacttttacgaaaacggctgggatggaaatgcgacagatcctatttttgaaccgttagtcaaactggataaaacggggaagcctgccccggctcttgcggaaagctggaaaatttccaaagatcagcttacatacacgttccgtttaagaaaaaatctcgttttcagcgacggttcaccgctgaccgcaaaggatgccgcattcactttaacactgctgcatgatcctgcatacgcgggctatgaagatatcaccacggcttatattaaaggcggtaaggcttacaaagaaggaaaggcaaagacgatagagggcattcgcgtccttgatgacagaaccattcaaatcacgactgagaaagtcagtgcgaagtcgctgcttcttttgggcgggcaggtgctgtcagaagcctactacgggaagaaatatcaattcggcaaactggactatttaaaagagctttatgccaaaccgctcggagcgggaccttatcaatttacagaataccttccgggacaggaaatacgctatcaggctaatgaacactattatgccggaaaaccgaaaacggaaaagctgatttataaaattatcgatccgtcaacttcccttcagctgtttgaaacgggtgaccttgattacgcttctttctcacctgatgatgatacggttcagcatttaaaaagtctcggttttgcgaatataagcgtatctgtcgtgaatgattacgggcttgtgtacgtcaatcacaagcgtccgccttttcaagataagaaagtgtcccaggcgcttatttacggacttgaccgtcaaaaaatcgtcgatgtccgctttaaacgctacggagaggtcgcgaatgttccggtgtctccggtttcgtgggcttatgatgacaaaggtgtcaatcggtatgcgtttaaccctgaaaaagccaaaaagcttcttgacgaagcaggctggaaaacgggcaaagacggtgtacgtgaaaaaaacggcaaaaagcttgaaatcagctattacacatctaaagcggatgatgatttcatcccgatagcgaaagaaaattatgcggacatcggaatctcattaaaaccggaagtgatggattttaatacagaagtagcgaaaatcaatgacaaacaatatgaccttgccgccgtttccacctcgcagatccttgatccgaatgacacggtggaaaagctggcttccggccatcccaataatgtgacggggtattccaatccgaaagcggaccggctgatagagaaaggagccggcacgcttgatatcagcaaaagaaaagagatttatcaccagctgtaccgggagctcggggaaaacccgccttacattctgattcattaccgtcagagcgcaagggcggtcagcggaaaaataaaagggcttgaggctgacaattattctggaatcagttcaagtctctcaaatgtctcaattcaatagaacggttgggcaaaatacccgatgcatcctggggattttgccctttcagcggaaaggaggggctttttatgaaacggtatgccgcagaacgattcattcaaatgcttgtgatcttattcggtacgtcctttattatttttttcttattcgccatgctgccgggcgactatattgattccaatgtaaacctgactccggaaagagcgaaggagttaaaagcgctttacgggctggatcagccgatttggcagcgttatgtgacatggctcggaaatgtgctcagcggagattttgggttttctttgaaatatcaggagaacgtcctgtcactgcttcggaaatatgtctggaattcgttttttgtcgcgtttttggcgttgcttgttacatggtcagccgcgatgataacgggtgtcatatccgctgtcaggaaatactcatggtttgacgggatcgtgacgtttcttgtttttgcttccatggcgtttccgtctttttttatcagccttctgtttattaagtggtttggggtggatttgaaaatattgcccgtcggcgggatgattgataccggcagcacgagtacaggtttttcgtacgtgcttgaagccgccagacatatgattcttccggtcgtgattttatctatgctcggcatcggctcgctgacaaggtatttccgctccggcatgctggacgtgatcagacaggattatatcagaacggcgagagcgaagggattgaaagagcgcaccgtcatctggaaacatgcgttgaaaaacgcgcttattccggccatcaccctgcttgcttttgaactgccgggactgttttccggagccatcattattgaacagattttcgggtggccgggtgtcggacgtattcagcttgaatctgtgcattatcgtgattatccggttttgatggcgtttaccttgtttttgtcttgtttaacgattgtagggaacttcttggcggatatcgcttatgccgcggttgatccgcgggtcagactgaaatagggggtgttcggaatgaaaaaacaaaaagaggtgccgccttctctttggaagcagacgtaccgccgcctgctgcagcataagctgacggtcatcagtcttcttttcttatattttatgtttttattgtgctttatcgggccgtctttttctccgtacataacagatcggacggatatttcaaatgccaatcagcatccgggaatccatcactggctgggcaccgaccagtacgggagagatgtgctgacgaggctgatgctggcggggcagatttctctgaccgtggggcttgcttcaatggtgctgtcgcttgtcatcggctctttactcggggctgcggccgggttttatcggggagccgctgatatgatcattatgcgcattgctgatatgctcatgtccatcccgggcctgccgctgcttttgattttggctgcggtgatgtcggagtggaaagtgccttctgaatacagaatgtacctgattatgatgatgttaagcctgatcggatggcccggtttggcgcggcttgtacgcggacagattttgtcgctgaaggagcagctgtttatgatggccgcggaagttttggggcttagtgataaacggaaaatcctctatcatttgcttcccaacacattgccgttattactggtagcggcgactttgcatgtggcgggagcgatgctgagtgaatctgcgctgagttttctcgggcttggcgttgctccgccgacaccttcttggggaaacatgatggaagcggcgaatcattttatggattttacactccgcccgtggctgtggattccgccgggaacggccatttttctgaccgttgtggcgattcatttgcttggagacggtttaagagacgcttttgatcctaaggtaaaacggcaggtgaaaatgaaatgaaaaaaccgcttttagaagtaaggcatttggaaacggctttttatacagaggagggtgcggtaaaggccgtggacggagtcagctttacgatacatgaggaggaaacggtttgtattgtaggagagtccggctgcgggaaaagtatggcgtcattgtccattatgcagcttattcccgagacggggagaatcgaacggggagcggtgcatttttccggacagaacctgttggaactgaaaccaaaagacatgcagaaaatccgcggaagcgaaatcgggatgatttttcaggaaccgatgacatctttgaatccggtgtttacaatcggtgagcagctgaccgaaccgattcgcgaacatttgttgctgagtaagaaagaggcatggcggagagccgttgaactgatcacgttagtggagatcccgaatgccgagcaggttatgcaccgatatcctcatgagctgagcggcggcatgctgcaacgcatcatgacggctgtcgcgctaagctgcgatccgaaactgatcattgccgacgagccgacgacagcgcttgacgtaaccattcaggcgcaaatattggatttattgcgggatatgaaaaagcaatttcgcacgtctattttattcattactcatgaccttggcgtggttgctgaaatggctgattatgtgattgtcatgtatgcgggaaaaattgtggaggaaggaccggttgcagagctgttttctgatccgaagcatccgtatacgaaagggctgctcgcggccaagccggttatcggtcaaaaaagggagacgctttacaccattccggggcaggtccccgagcttgcggacctgtcgggatcgtcttgttattttgcggagcgatgtgaacacagcacggaaatatgccggagatcgagcccgcattttactgaattcgggaaggggcatcaggcggcgtgctggctttacagagaggagaaagcagatgagtgatgtgttgctggaggtcaaggggctgaaaaaatattacgaggagcatggggggatgagaaagactcataaaaaacccgtaaaagcggttgacggtgtcagttttacgataggaaagggagaagtgttcggcttagcgggagaatcgggcagcggaaagtcatcaatcggcaagaccattttgaggcttcatgagaaaacagggggagaggtgttttttcaggggcgtgatgtgtttcggatgagccggcgcgagctcaaaactttcagatcggaagcgcagctcatctttcaagatccgttcagttctttaaatccccggcgccggatcggagaagccatcggtgaagcgatgatcgagcatcaattggcggtgaagcggaatgcgcgtgataaagcggcggaggttcttgaagcctgcggactttccgcaaacttcatcgatcgttatccgcatgaattttcaggagggcagcggcagcggatcgtgattgcaagagcgatggcgctcaaaccgcaatttatcattatggatgaacccgtggcggcgttagatgtctccatccaggcgcagatgatcaatttgttcagcagccttcaaaaacagcacgggctgtcatacttgttcatttctcatgatttaagcgtggtggagcacttatgtacgaaggtcgccattatgtatttagggacgattgtggaatatgcgtcaaaggaggagctcttttcacggccgcttcacccttatacgaaagcgctgttatcagccgtgcctgttcctgatcccggagcgaaaagggagcggataattttaaagggtgatataccaagcccctctgatccgccttcaggctgtaaattccgaacgagatgtccggcagccaagaagatatgtgctgagaaaagtccggcgctgtcagaaaaagggtttcatcattttgcggcatgccacttcgtgtaattgagaaaaaaacggttttattgataatgaacataaaaaacctgccgggcagaccggcaggttttttgatgttattttggtgacggcagtccgagtccttcggcaacgcgtctgccgtattcaggatcagccttgtagaagtggccgatctggcgcagcttaatttcttctttttccacaggtttcatcgcactgacgatattggcgacaaggcgcgcgcgctcttcctcgctcatcaggcggtacaggtcgccggcttgtgtgtaatgatcatgatgattatagcttacactgtcagcgaaacctgatacagggtatgccgcctgtttatcttcaggtgactctttcgggccgccgaagctgttaggctcgtaatagacggagcggccgccgttatcatcaaaacgcatttgtccgtcacgctgatagtttttcacttcattgcgggaacggttgatcggcagcgcctgatggttcgcgccgacacggtagcgatgcgcgtcatggtatgcgaacaaccggccttgaagcattttgtcaggtgagacgtcgacgccgggcactaatgtgccgggagagaacgtcgcctgttctacttccgcaaagtaattttccggattgcggttcagaaccatgcggccgacttcgatcagcggatagtctttttgagaccatacttttgtgacgtcaaacggatcaaagcgatatgtgtttgcatcttctaacggcatgatttgaacatataatttccatgcggggaaatcgccgttttcaatcgcattgaacaaatcttccgtatggtaatcgggattttcgcccgcgatttttgcggctgtattaacatcaaggtttttcacgccttgctctgttttaaagtgatatttaatccagacgccttcgcctttatcatttgtccatttaaatgtatggcttccgaatccgtgcatatggcgaagagtcgccggaatgccccggtctgacatcagaatggttacctggtgcagggattcgggtgacaaagaccagaaatcccaaacggccgtcggatttttcagatgtgttctcggatctcttttttgtgtatggataaagtcagggaacttgatggcatcgcggatgaagaacacgggtgtattgtttccgacgatatcgtagtttccttcttctgtataaaatttaacggcaaatccgcgcgggtcgcgcactgtgtcactagagcccagttcgcccgcaacggttgagaaacggatgaaaagcggcgtgcgtttaccgacttctgacagaaatgcggctttcgtatattttgtaacgtcatttgtgacttcaaaataaccgtgtgcgcccgcgccttttgcgtgaacgacacgctccggaacgcgttctctgttaaagtgcgccaatttctcaagcagatggacgtcttgtattaaagcaggaccgcgatcgccggccgtcattgagttttggttatctccgacaggagcgccccagctggttgtcagtttatttgaactcatgtgatcacctctttaaatttataagaacataatatcacctatcagtaaaaagtcaatattattttataatgattataaaataattatttttattatcgaaaagaaggtatgggtttaataacacacttgactgacgggaataatgggtttaatatgagaaaaaatagaaaccgctgacttggacacaagaggctcttattcttcactggataagggcctttttttattgtcaggcggtaagggaggcggcgattgtatgcttttccggcagcattttaaacctgtcgatattcacggtcatctgccgtacagccttaatttcggcaaaaacgataagacattttccgattataaccgggagcggtcggaaagaatgaatctcacttgggattttcctgatccgcatgatgttgatggcgatgacggcgaaatcgctttgatgacaagatgggagaaagaattagataagtacggcattgacgtgctgaattttttaacagcagagagcaatgaccggatggcggcgtttattcaagccaatcccgcgaggtttaccggatttgcatatcatcctttggaacaaaaggatgcgtatgaggagctgaaaagagcggttgaagagctcggtctgaaaggatataaactgttcgggccgctgacagacatcgagtttcatgatccgtcgctgaaaaagctgtggacgtatctggctgacaaaagactgcctgtattaattcacttcggacttttagggagagcggggggcattgtcagccatcgcaacatcaacccgctctccatctatcgcgtcgcgagagagtatgctgatataccgttcatcattccgcatttcggcgccggatattatcaggaactgctgcagctgtgctggagctgcccgaatgtgtatattgacacgtccggctcaaatcagtggatgaggtggatgccgtaccggcttgatttggaaattctgtttcgaaagacatctgaattaatcggtgctgaacggatcatcttcgggacggattcgaacggatttccgagaggatatgtatacagatatcttcaggagcaggtgaggacctgccgggaaatcaatatgcgggaagaagatatagaaaacattttcggcaacaacgcgcagacattattgaaaatcgcccggaaagaaaaggaagtaaatacgtgatacagccgatgcgctctttggcaggtttatgccggaaggcgcatttttaattcatacaaaaaacagttgacaagtcggaataatttgaattaacatgatattcaaatttaaaaacaaacgggttgccgatcggaccgccgaaggctcccatctctgcaagcaatcggagatgggggcctttttgtttttcgatcgcatgcggcagaaagagaggggaagacagatggctgtaaccatcagcatacaagaaaaagcttttgagcatgaaggccggaaaacgccggtgctgaatgatattgagctgtcaattgcatcgggagaatttttgactgtcatcggaccgagcggatgcggcaaaagcacgcttttaaaattgattgccggtcttgataccgattataaaggctctgtcgcaataaacggccgcaatgtgtcgggaccgggcatccggcagggatttatctttcaggagcaccggctgtttccctggctgacggtaaaacaaaacatcgctgccgatctcaatatgaacgacccggccgttcggaaaaaagtggatgatctgattgaggttgtcaggctgcagggagcggagaacgcttatccgcgcgaattatccggcggcatgtcgcagcgggttgccatcgccagagcccttttgcgtgagccggaggtgctgcttttagatgaaccgttcggggcgcttgacgcttttacgagaaaacatttgcaggatgtgctgcttgatatatggcgcgagaaaaaaacgacgatgattcttgtcacgcatgatattgatgaatccgtctatttaggcgataagctggcgatcctcagggcaaagcccggccggctgcacagcctgatgccgattcagcttccgcatccgcgcaatcggacgtcagcggattttcaggccgtccggcagaaggtgctttctgaatttgagaaaacggaagacctccggtttgcggatgggtccggaatatagaagggacgaagcgaagtgaaaaaaatcatcattcttttagccgcagcagtcatgatgtcagccggatgcagtgcagacgggacaggagggggcgggaaaacggtgaaagaaatccggatcggcatccagcagagtttaagcccgcttctcattgccaaggaaaaaggctggtttgaagaggccttcaaaaaagacggaataaaagtaaaatgggtcgaattccaaagcggtcctccgcaatttgaaggtcttgccgccgataagcttgatttttcccaggtcggcaattcaccggtcatttccggtcaggcggcgggaattgattttaaagagatcgggctgtctcaggacgggttaaaggcaaacggcattctcgtaaacaagggcagcgggattcagagcctgaaagaattgaaaggtaaaaaaatcgccgtagccaaaggcagcagcggctttgattttctctataaagctttagataaagcggggctttccgccgatgacgtcaccatcatccagcttcagcccgatgaggcggtttccgcttttgaaaacaaatcagttgacgcatggtccatttgggagccgtatttgtcgattgaaacgctgcagcacggggcggaaatattggcgaacggagaaagcacagatttatattctcccggtttcacattagtcagaacgggattttccaaagaacacccggatgaggttgtccgttttctgaaagtgttcaataaagcagttacatggcaaaaggaacacaaagatgaagccgtctccttatatgcgaaaatcaaacatcttgatccgaaagtcgtcagaaacgtgcttaacaatactgagcctctcaatgaaccgatcgatgatgatattgtcaaagcccagcaggaaaccgctgattttcaatatcgaacaaaagcgattcataagaaaattcatgtaaaagacgttgtcgacaattcatttattaaaaaagcgcttgaaacgggggatggcaagtaatgaaagcagaagcatcaacggctgccggcgcaataagccaatcagaaaagaaagctctggcaagatcccggaagtattcataccaatggatgaaagggattgtactcccggctgcggtcatcgcagtatggcagtttatcgcaagtctgggcatcgtctcggccgcggtgctctcgtcgcctgtcgtcatcttgcagacgtttcaggaacttcttctttcaggtgagctttggggtcatttagagatcagtttataccgggcggctgccggatttctgcttggcgcgggcctcggacttgtttccgggctgctggtcggtttttcaaagcggacggaagcataccttgatccgtctctgcaaatgctcaggacggttccgcacttggccgtgactcctctgttcattttgtggttcggatttgatgagacatctaaaattctgctgatcgcattgggggctttttttcccgtatacattaatacgtttctcggaatccgcagtgtggacgcgaagctgtttgacgtcgcgcgggtgctggaatttaattggtatcagcagatgacgaaattaattcttccggcatctctcccgaatatcctgctcggcatcaggctctccctaggcattgcgtggctcggtctcgtggtggcggaactgatgggatcgagcgagggcgtcggttatatgattatggatgccagacaattttcacagacaaataaggtgtttgtcggcattatcatttttgcggctgtcggcaagctgacagatgcattggtcagaatgctcgaacggaaactattaaaatggcggaacagttatgaagggtaacctattaaaaaaggagagattcatatggagattctttggtttattccgacgcatggtgacggccggtatttagggacgcaaacgggagggagaacggcggatcatctttattttaagcaagtggcacaggcggcggacagactcgggtatacgggggttctgctgccgacggggagatcatgcgaagacccgtggctgacggctgccgctttagcgggggaaacgagtgacttgaaatttttagtggcggtccggccgggactgatgcagccgtctgtcgccgcgagaatggcgtcgacaatggaccggctgtcagacggccgtttgctcgtaaatgtcgtagcgggcggagatccttatgaactggcgggagacggcatgtttatcagccacgatgaacgttataaggcgactgaagaatttttaaccgtctggcgcggactcatgcggggcgaaacggtgacatatgaaggggaccatatcaaggtggaaaacagcaacctcctgttcccgccaaaacagtctccgcatccgccattatatttcggcggttcatcacaggcgggaattgaggctgctgcgaaacatacagatgtctatttaacatggggagagccgccggagcaggtaaaagaaaagattgaaaccgttaaaaaacaggctgccaaggaaggaaggacgatgcgttttggcatcagacttcacgtgattgtccgggagactgaggaagaggcatgggaagcggctgaacgattaatcagccacttagacgaagagacaattgcgaaagcgcaggctgcgctccggcgcgctgattcatcgggacaaaaacggatggccgatcttcataacggtgaccgctcgaagcttgagatcagcccgaatctctgggccggcatcggactggtcagaggcggagcgggcacggcgcttgtcggtgatccgcagactgtcgctgatcgaattttagagtatcaggcactcggcattgagtcgtttatcttttcaggctatccgcatctggaagaagcttattatctggctgaactcgtgtttccgcttctgccgtttcagaatgaacggactaacaagcttgagcgcagagtgggtgaagcaatgggaaacgaccattttgcaagaggaaataaagcgacagtctgatgacgtcgcaaggcggatcattgacggcgggcgctttctgcggattcatttccggggaaatgccggcagtgaaggcgggtattcacccgcctttttaagcgcttagcttgcacgatgctcatctggatgatatgatacaaaacgtaattattacgatttgttaggagtgctgaaatggcaaaaaaatcaaaagtaatcaaagagctcaagcggcagaagcttgttgaacaatatgcggacatccgaagagaattaaaggcaaaaggcgactgggaagcgctgagcaaactgccgcgtgattctgctccggccaggcttcataaccgctgtacggtgacggggcggccccgcggatatatgagaaaatttaaactgtccagaatcgcattcagggagctggcccataaaggccgggttcccggggtgaaaaaagcgagctggtaacataaaaaactccggatctgtcatgaaccggagtttttgccgtgcttatgaaaagtgaaaacataagccaaatgctgaatcatcatcagaatgaaaatcaaaagaatcggaaaaaaaggtagatgcggctgaatcagcggataaaacaaaagcagaacggctgcggccggcaatgagaagtaaacggcgatatacgaggaacggcaagctttagccgtcatcattcgttctctttcatcctgttcctcaaattcatcgggcactagcctatgctttttgccgtttcgttttttcttttcggcatagatatacaatgcggcacaaacggtaaacagcagaaacggagtgatattcagctcaaatgcaccgctcccctccgtttggaaaaactgagcgatccgcggcgccgcttccataaaggaaataagcgtccagcaggccaatccgtagagtgcaaggtgaaaacacgcttttcttttcaaactcattttttctcctcctccagccagaaaacttcctccatcggcagggagaaagcccggcagatgttaagcgccaataagagtgaaggcacataatctcctttttcaatcgctgcaatcgtctgtctggtggctccggcttcttttccgagcgtttcctgagaatagccgaatctggctctcagctcttttactttatttttcatcatcagggcgtacctcaagttttcttcttttttatattgtatgagattcttaacaaaatgtaaacctaacttaacatgtggacgaaaaaagaatttttttcgacaaattttttaacattcccttgacgaaaaaaaaatatacatgtaatattagaaacatcaaatcggtactgacaaaaaactttgatgcgggtgtagtttagtggtaaaacctcagccttccaagctgatgtcgtgagttcgattctcatcacccgctccatacatacgttattaacgcagtgtttcgtttctctgataaacgaagtattgcgtttttttatgtgaaaaaagacacgaaggcgtgtctttttatgaaagccaagagacggtatgcgtgcctccgtgaatttgttcaaacattttggttaaagatgatagcagctcatccgccgcgtcggcatgaaatgaaggcgggaaaaagatcagctgcagcattttctttgtgccgattgttacagggcgggtgttgatatgtccggtaaggccgccgaaaatgccgccagagtcggagaaagcaagtacgtgttctttttctccgattgtaatcgaaatcggttcatctatttctgcggcgtcatacgccatgataggcaatgaatatttcaaggagaaaaaaagtatggtatcatgggctgaattcacactttcaatgaatcgttcccgggaaatatcgccgagcataagctccatcggcgttttttgtcctgaaaaggcgggactgagctgttccattatacacgcccactctttaacaaaaggctgctcatctataccgccgtcagcataatcaaagtaaagagattcttgaaataaacggaggcggcctttcagcatttgcggagcaggcccgacttcgatctgttcatataagacggctgccgctttgatccccggcacccgttcagcaataagtggatctaaactgatgttcaagtgtgttcactccatttcgggatgataaaactctattatacccgtgcgggagcctgatcacaaagaaaggaggctgtgcaaaaaatgaatattcataaactgaaagaggaattaatcgaatacgccaaaagcatcggagttgacaaaatcgggtttacaacggctgatacgttcgacagtctgcgggaccggctgattcttcaggaatcactcggctatttatccggttttgaagagccggatattgaaaaacgggttactccgtctttgcttctcccgaaagccaaatcaatcgtcgccatcgcccttgcttatccttccaaaatgaaagatgcgccgaggagcacgagggacgggcggcgcggcattttttgcagagcttcctgggggaaggattatcatgatgtgctgcgggaaaagcttgatctgctggagaattttctccaaagcaaacatgaggatatccgcacaaagtcaatggtggatacaggagaattgtccgacagggccgtggctgaacgggcgggaatcggcttcagcgccaaaaactgcatgatcaccacgcctgaatacggttcttacgtctatctggctgaaatgatcaccaatctgccctttgaaccggatgtgccgattgaagatatgtgcggtacgtgcacaaaatgtctagacgcgtgtccgaccggcgccctcgtcaatcccggacagcttaacgcccagcgctgtatttcgttcctgacccagacaaagggatttttgccggatgagttccgcacgaaaatcggaaaccgtctgtatggctgtgacacgtgccagacggtctgtccgattaataaggggaaagattttcatcttcatccgcagatggagcctgatccggaaatcgcaaagccgctgttaaagccgcttttgaccataagcaaccgcgaattcaaagaaaaattcggacatgtatcgggatcatggcgcggcaagaagccgatacagcggaatgcgattttagctttggctcattttaaagatgcctcgtctcttccggaattaacggccttgatgcaccaagatccgcgccccgtcatcaggggtacggccgcctgggccatcgggaaaatcggtgatcctgattatgcggaggaattagaaaaagcgcttcaaaaggagcaggatgaagacgccatacgggaaattgaaaagggactggagctgttatcggtttctgagaagactaaaaccggccggtcctgacatatgtatagagaaaaagcacttggccggagttcaagtgttttttctttataaaatcgtatggtgggtggagcgcttgaagcatattattgaagatttagcggaggcccggcttcattatttaatcaacggaactgagatgaggcagaatgggcaggccggcgatcttgaggtcctgacgagaaaaaaagagctgtttgaaaaacggaaagttgatatcgtgaaagcgaaggcaaaagccgtcattgtcaaaagcagtcttgaggacgacggcacgttatgtgtcatgtacacgattcatttcgaatatttgtgcaaggagcatgacggacacctttacttagaagagcagattgaggaacggactgcatttctctatgatgagcttttgattaaagaccgggaagtaaagaaaaaaccggctggattttctgacggaaacagcgtaattgaatatgagcggagtgaacgggaagatttcgggcgggcgtttcaatacgaccgtctggctgccgtgcagtacgcggagaagttttggaataaacgaaatcccgcttataaaaatttcagcgataattgcaccaattttatttcccaatgtttacatgccggaaaagcaccgatgcgggggcatccgaacagaggctcaggctggtggatgaaggcaagctcgtggagctacagctggacggtcgcgcattcgatgaagatgtatctggcccaatccaaggcagggcttcgcgcagtgcaagtatcaagagctgaagaactgatgcccggagatatcatttgctatgattttgaaggagacggccgttttaatcatacggcgatcgtggtcgcaaaagataaaagcaatatgccgctcgtcaatgcccaaacgtatgacagcaggatgagatattggtcatatgaggattcaacggcgtatactccttccatcagatatgcgttttttcatattacggatgatacgacaaaagagtaattaatgatataatggtgggcggaataaaaaacagaggtgaacatcgtggcattacatgtcgttttatatcaacccgaaatcccggccaatacgggaaatatcgcacgtacttgtgcggcaacagacacaacgcttcatttgatccgcccgctcggattctcaaccgatgataaaatgctgaagcgcgccggactcgattattgggagttcgtcaacgtcgtatatcatgattcattggaagagttatttgaagcatatgaaaacggaaagtttttcttcattacaaaattcggtcaaaagccgcacacatcatttgattactcaaatacggaggaagactttttcttcgtattcggcagagaaacgagcggacttccgaaagaattgatcgaaaacaatatggaccgctgcctgcgtctgccgatgaccgagcatgtgagatcattaaatctgtccaacacggccgcgattcttgtatatgaagcgctgcgccagcaaaattacagagatttgacgtgagaaaaaacgcccgcatccgggcgtttttttattgaataaaaaagacgggcagcagcggtttacggcatttttatatttccgggcttaacaacgtaacagtgttatgttacaatacgttcatcgaaggagctggattcatggaggaacaactgatttctaaaaaagaattgctggaagaaacatcaatttcatacgggcagctgtaccggtggaaacggaaaaatttaattcctgaagaatggtttatccgaaaatcgacgtttacaggccaggaaacattttttccgagagcggaaatattaaaacgcatctcaaaaatacaggaaatgaaagaaaatctgtctctggatgaaatgagagaaatgctgtctccgcaaatgactgatgtcaatataacgtctgcggaactgcttcaaaagggactgatttcaaaagccgcgctgcaagtttatggcgaagacggcgtgacattcacgtcccgcgcgctgctgtctttatatgtgcttgaagggcttttgcaatcgggcaatatcagccttgaggaaggaaaattggcggcgggggtgctgaagacgtatgaggcttccgagctgaaagcgaatacggagcttgtcatgctccgaaagctcggcgtaacgacgtgcttcatcgcagacgcggaacatattttatttgaaccgactgtcaaagtggttgaacgggtggcgcttgctgcggcatcggaagaattaaaaacgaaatggatgcaggaggaccatcaatggaagtaacagataaattaatcattaacggttcgggaagttcaaaaggaggccgttttcatacagtggagatcaacgggagcggcacggtgtcaggtgatgtggagtgcacgagccttttgtttaacggcagcggaaaaacagacggacatgtcaagacgcaaacactgacaatcagcggttcggggaaaatttccggcagtgccgaagctgaatccatccgtatcaacggaacgggtgtcattaaaggtgatgtcaaaacggagcggctgaacgtcgcgggattttcatctttcggcggcggtgtgaaagctgatgatattttcatatccgggaaagccgggattgaaggtgattgcgagacagagacattccgttcggaaggcaaatgcaagatcggcggcctgctgaatgccgatgaagtcagtatgaagctggctgcgggagaaagtcatgtgaaagaaatcggctgccgccatttgaaagtgatgagcagaaagagcgtgcttacgcgttttaagctgatgccggccccggtgctgacagcagagctgattgagggtgacatcattgaattggcggacacgaacgcgaagacagtccgcggaaatcatgtgcggatcggcgcgggctgcaccattgggacggtggaatacagcggcgattttacatgtgatcctaccgctttggttaacaaagtcgtgaaacgataggaggagctgcaatggaaacgacaaaaaaattgagtcatttaaaaatgtacggagccggacacgcttccggcggttcctaccaaaatgtaagcattaaaggggaaggaactgtcggcgaaggacttcaaagcgaacgctgccggatattcggcacgggactttttctcggagatgccgagatcagcaggctgaaaattttcggagagcatgaagttgcaggagatttatcagcacattcagcaaatgtgatcggcacattgaaagtcggcggctccatgcgttttgccaggatgaggctgaagggacttgctgaaattggcggcggggccgcgggagaacagtgtcatataaaaggcagtctcaccgtcggcggcgattgcgagacggagctgcttcatgtaacaggatgtatcaatgtggcgggattgttaaacgcaggggacgtaaacatccatttgcgttatgaccgaagccgcgtgaaagaaatcggcggcacatcgattaccgtcagacggaaacccggttttcttaaacggaaagccggcatgctttctgctgaattgatcgaaggagacgcaatttacctcgaatccacggaagcggacatcgtcagagggaagcgtgtggaaatcggcccgggctgcaaaatcggaaaaatcgagtatcaaacaagctgtaagtctcatgaaaaatcaactgtccaagaacatattcaaatatgaaacattgttatgttgtacaggaaagggtgctcttcataaagagcacccttttgccgttatttgttttcaggtttgctgtcgtaacccgcagtaaaaatggatactaaaaaagtgagaatgaccccaagtaaaatgatcgttttcatcatgtctcctcctctttgcttttccatttgatgtccgagtctggatgaaactgtatttctttcattatgaacggtgcaccggacccttgtcaatgacggccttataacgtctttatttttaagaaacgaaaagcatgtattatcacgtcaccgcatagattgtaacaaagtaccttatttctagtgcattaaccatgatagaggaggttcttatggatatattaaagaaaattgaaaagtacagagaggaagagcagcgtctcaaatgggaagggacgttcgctgattatttggagatcataaaagaaaatccattggtcgcgcagtctgctcattctcgcgtttttaatatgataaaagacagcggaatcgaggaggatgacgggaaaaagacatacagctttttctcgagggagctgttcggccttgaggaatctctggaacggctcgtggaggaatactttcacccggctgccaagcggctcgatgtaagaaaacggattttactattgatgggacctgtcagcggcggaaagtcaactcttgtcaccatgctgaaaaaagggcttgaagcctactcattgacagataacggcgctgtttacgccattaaaggctgcccgatgcatgaagatcctctccatctcattccccatcatctgcgcgacgacttctacagagaatacggcatcagaattgagggcagcctttctccgcttaatgtcatgcggcttgaagaagaatacggcggcagaattgaggatgttaaagttgaacgtatattcttctcggaggataaacgtaccggaatcggaaccttcagcccgtctgacccgaaatcacaggatatcgccgatttgacggggagcattgatttttctacgattgccgaatacggttcggaatcagatccgcgcgcttatcggtttgacggtgaattaaataaagcgaaccgcggaatgatggaatttcaggaaatgctgaaatgcgatgaaaaatttctgtggcaccttctgtcactcacgcaggaagggaatttcaaagccggacggtttgcgctcatctcagccgacgaattggttgttgcgcatacgaacgaaacggagtaccgctcgtttattgccaataagaaaaacgaagcccttcactccaggatcatcgtgatgcctgttccttataatttaaaggtgtcagaggaagaacggatttatgaaaaaatgatttctgaaagtgatgtttctgacgtacacatcgcccccatacattaaaagtggccgcgatgttttctattttgacccggctgaaggaaccgaaccgctctgatattgatctcgtcaaaaaaatgaggctctatgacggagaaagcgttgaaggttacaattccgttgatctggaggatatgaagaaggaattccatgatgaaggaatgagcggtatcgacccgcgctatgtcatcaaccgcatttcctcaacgattatcagaaaaaatatggaatccatcaattcgcttgacgtgctgcgttccttaaaagaaggactcgaccagcatccgtccatctccgccgaggacaaagagcggtatatgaattttatttccgccgccaggaaagagtacgatgacatcgccaaaaaggaagtgcagaaggcgttcgtttattcatatgaagaatccgcgaaaactctcatggacaattatttagataatgtggaagcgtactgcaataaaaataagcttcgcgatccgctgacgggtgaagaaatgaatcctgacgaaaaactgatgagatccattgaagagcagatcggcatttcagaaaacgccaaaaaagcgttccgcgaagaaatcttaatccgcatatccgcctatgcaagaaaaggaaaacgctttgactataattcgcacgaaagactccgcgaagcgattcagaaaaagctgttcgcagacttaaaagatgtagtgaaaattacgacctccaccaaaacgccggatgaacagcagcttaaaaaggtcaatgaggtagtggcaaggttaatagatgaacacggctataattcgactagcgctaatgaactgctgaagtatgtcggaagcttgttaaaccgctgatatttgatttcattgagaggcccgtctgtaaaaggacgggttcttttgtctgtttttcgcaattgtttgtcaattggagagtccggccggcataagataaaaataaatcttttcgccggacttgtttcataaacaggaccaagccggaatacacatgtaaaacgaccataacggttaaggaggggaattcatgtcccgtaatgacagcggaaattttttgatttcagaggaagactggtccctccatcgcaaaggctttgacgaccagcagcgccaccaaaagaaagtgcaggaagcgataaaaaacaaccttccggaccttgtcactgaggaaagcattattatgtccaacggaaaagatgttgtgaaaatcccgattcgttcgcttgatgaatataaaatccgttataactatgataaaaataaacatgtcggccaaggcgacggcgacagcgaagtcggcgatgtcgtcgcaagagacggcgcagataaaaagcagggcgccggaaaaggccagggagcaggcgatcaggcaggcgaggattattatgaagcggaagtttcattgatggatctggaagaagcgctgtttcaggaattagaactgccgaatctgcagcaaaaggaaagggacaatatcgtccataccgatatcgagttcaatgatatccggaaaaccgggctgacagggaatatcgataagaaaaggacgatgctgtcggcctataaacgaaacgccatgacaggcaagccgtcgttttaccctatttatccggaagatctgaaatacaaaacatggaatgatgtgacgaagccggaatcgaaagctgtcgttttagccatgatggatacaagcggttcgatgggcgtatgggaaaagtatatggcgaggagtttctttttttggatgacacgatttttacggacaaagtatgaaacggttgatatcgaatttatcgcccaccatacggaagcgaaggttgtgtcggaagaagattttttctcgaaaggcgagagcggaggcaccatctgttcctccgtttaccggaagtctcttgaattaattgatgaaaaatatgaccccgcccgctacaacatctatccgtttcatttttcagacggagataacctgacttcggataacgcccggtgcgtaaagctcgtcaatgacatcatgaaaaaatcgaatctgttctgttacggtgaggtcaatcaatataacaggcattccaccctcatgtccgcctataaaaatgtcaaagatgataaatttaaatactacatcctgaaacagaaatcggacgtatttcaagcgctgaaaagcttttttaaaaatgaggaagccggtataagcaaagcatcgtattaaatataaagccgagtgaagaatcgtgcggccgcggttcttcacccggcttttttaaattaaaaataaagagaaaaaacggcataaaaaaaatccttaaaaaatgaaacttttctctttacaaaccttctttcatttattaatattttatcttgtgaactattattaagggaatgaggtgaaaatacggtgattgaatcagagctcgctttgctcagttttgaacaactgtttgatacttccagatcgatttacaaaaagcagaaaatgattctggagacagtgcttgaaccttttgatattacagtgctgcagtatctgctgatgttcaaaatacataagagcaaaagcacgcagctttcaaggctggctttgtcgcttgatctgaaaccggcgtctgtcacgagaatgaccgatattctgtataagcgccgcctaatggttcggagcgactatcacgacgaccggcgtgttgttatgattcagttaaccgaagagggggaagaacttctaaagaaagctgctgttcaatatgccgaaaaagcggcggtcttataccggcagctcaataccgctgaactgcagtacctgcgcaagcttgcggaaagtttaacgaagcttgcaaacggctgtgcagtgaaaaacggaaaataaaaaaatccccacatatttttatcatcattccacaaaatgatagaggaagaaacgaaaggagaaaacaaaatgaacagaggacgtttaattctgaccaacattatcggtttgattgttgttcttgcaattataggcggaggtgcttactactattatcaaagcacacactatgtaaaaaccgatgaagcgaaagttgccggcgacatggctgctatcacagctcctgctgcgggtaaagtaactgactggaaccttgatgaggggaaagaagtaagcaaaaacgacgtggttgcaaaaattaaaggacagcaaaatgctgacgtaaaagccatcatggatggaacaatcgtgaaaaacgaagtgaaaaacggccaaatggtgcaagccggtacgacaattgcccaggaaattgacatgaaacacctttacatcactgcaaacattaaagaaacagacattagagacattgaagtaggaaacaaagtagacgtaattgttgacggcgatcctaatacaacatttgacggaacagtagaagaaatcggttatgcgacaaattcaacatttgatatgctgccttcttcaaactcaagcggcaactacactaaagtaacgcaaaaagttcctgttaaaatttcactcagcaacccatctgacaaggtgcttcctggtatgaacgcatctgtaaaaatctctgaataatacagatcagtcatcaaaccatgaagggaggttgtcttaggtggctaaatcagataatcaagtaaaaagtcctaaaacattgcttattgtgcttatggccgggttattcctggcgatcttgaaccaaacgcttcttaacgtggcgatgccgcacttaatgaccgagttcggtgtgagtgcgacgacgattcagtggcttacgaccggatacatgctggtcaacggtgttttgattccgttatctgcgttcttaatcacccggttcggacagagaagcctctttctcgtagccatgttctgttttacagcgggaacgttagtctgcggaatcgcgcctaacttctcaaccatgctgatcggccggttaattcaggcggtcggcggcggtatcctgcagccgctggtcatgacaaccattctgcttatcttcccgcctgaaagcagggggaaaggaatggggattttcggtcttgcgatgatgtttgctccggcggtcggaccgactctatccggctggatcatcgagcattacacatggcgcattatgttctacggccttgttccgatcggggcaatcgttattatcatagcgtttttcctctttaagaacttggtggaaccgcaaaaaatcaaactcgacagcttgggtgcgattctatctattgtcggattcgcctcattgctttacggagtcagtgaagcgggcagcgacggctggggagatccgatcgtgctgtctaccgtcattgtcggtgtcatcgcgattgccgcgtttgtcattcagcaattgcgctctgaaaaaccgatgcttgacttccgggtatttaaatatgatattttctcactttccagtgtcattaatatcattattaccgttgcgctttacacaggaatgttcctgcttccgatttacctgcagaacttagtcggctttacggcgctgcaatcgggtctcttgctattgccgggcgcgattgtcatgctgatcatgtcgccgatttccggtattctgtttgacaaaattggtccgagaccgcttgcgattatcgggctggtcatcacggtcgcaacgacattccagtacacaaaattgacaattgacacaccttacacgcacatcatgcttgtctatgccatccgcgcattcggtatgtcactgttaatgatgcctgttatgacagccggaatgaaccagcttccggcacggttgaacagccacggcacggcgatgagcaacacgctccgccagatcagcggatcaatcggaacaagtttgatcacaacgatttatacgaaccgtacgacaatgcattattcgcagattgcggataaaacaagcacggctgatccaagcttcatgcagtcgttccaaagcgcggtttcgaatttaatggtcaacatgaacatgtcgcttgatgcggcgaaacaaaccgtttattcatatctctacaaaacagcttcactcaattccaacgttatggggattaatgacgcgtttatgtgggcgacgatctttgcggttatcggcgtagtcctgagtctgttcttgcgtgacgtgcggaaagacaaacagcgggcgaagaaaaaagaggagctgtcattgcttccggcccctaaagaagtgaaggaatcttaatcatctgaatgggaggtttcctgaatgaaaatttacgtagtgtacgatagtgaaggcgaacacacaaaacatcttgctgaagccattgccgagggcgcacgagaaaacgctgaggctgaagtcctgatcgaccatgtcgatcaagcagacatccgcaagctgaaagacatggatgccattatctggggatgcccgggacactttggcaccatcagttcaggcttaaaagcgtggatcgacagactcggctatctgtgggctgaaggcgagctgattgataaagtcggcgctgtattctgtacgacggcgacaacacacggcggattagaaatgaccatgcacaatctgatcactcctatgtttcaccaaggcatgattgttgtcggtcttcccggcaacgttcctgaaaacgcgctgtacggctcttactacggcgcgggcgtcacatgcccggttgacagcgatgtgctgatgacggaagaaggccttcaattaggccgtgcgcttggcagacgtgtcagccaggtcactggtaatctaactgccggacgacagtaaggagagggttatatggccattattatagcggttattgctgctgtcattgtgattgcacttcttatcaccttcaatgtccgcagcacttctgcaggacaggatgtcaaagaagaaaagagagaagcgatcggcactacagccgaacagccggaaaagcatgatccggccgaggagcgctcagccgagcatgctcccgtcgttgtaaaatctgaatctccccgtgagaaaaagaatacaatgggcgatgatgtgtaccgtcaggcgcttcagaagtttaagacttctgagacggatcaggaaccaaacgatcctgatagcggcggcaaaatgcaggatagcagctatcgtgatgcgctgctctccttaaaaaacaaaaagaagtaattgaaaaggcaaatccgcgtaagagcggatttgtcttttttttattgaagatattgtaatacgtgatgatctagtgtactatgttactcatacacttgatccgaatggagagagaaagaatgacatcgtttttaggtttgctgaaaaaagatgcgaaagtttcatggatttggctcgcggtgtggctttgcggcatgatttgctgggcgttttcagcccacgtcatcgctgcccgtcagaaagaaccgctcgtcattttcggcttttttacggcaatggggttttttcaatttcttgtagcgccgctttttatgtattatcaccttcataaagaaggaaaaaaccagctgtggctttacaatccgaatgggggattttatctgctggcttccaagctgacggcctcactgctgtatcagttgatcgggcagctggcgctgacgggttacggcatttggatgtaccggatgctttctgcaaaaggagtgctggaacacaccattcccctggccggcacattaaccgggctgaatgcttacctgctgatcagttcagcgtacttatctgtgatcgtggccgtattttggactgtttttcactcattaaaacattttcccgtcctccgttgggggatctgcatcgtgcttgcgtttgtctggacctatattgacgataaaatcattacgcctttcacttcatctcaacatgatttatggccggtaaaagtgtatgcgaattttcattttcattatacgaaattgtccggatggacgatggagctgaaagccgtccacatttcgcttttcagctttctggcagtgatcgtgcttgcagcgctctgtctcgcgctggcctctatactgctgaatcgaaaggttgaggtgtaatgatggagaatgaatttcagtcatccaagcccatttatctgcagattgccgatcgtatatattaccggctgatccgaagtgagctttcaccgggggacaaactgccgtccgtaagggagatggccgtacagatgaaagtgaatccgaacacgatacaaagaacgtacagtgaaatggaaaggctggggatcgtggagacgagaagaggacagggaacctttatagcggaaagatccgatctgaaagcagagctgaaagacaggctgacaaaagacgttttcaaacgctttattcaggaaatggcggagctggggttatctcctgaggaaatgctcgaggggatcaaacaatatgcggaggaagcaaacgatgaatcttgattttgaacgcgtaacaaaaaaatacggccgcaggatcgcggtcagcgatgtatcattttcattgtctccgggtaaaatctacggaattttagggccgaacggaagcggtaaatcaacaacgcttaaaatgcttgcagggcttgcttttccgacatcgggcgccgtccggatgggagagtgcaaagtaagcaggaacatgctgtttcgtacggcttatttaaccgaacatgatatgttttccgcccggacgaccgtcggtgatatgctcacgttttatcattcgcaattcccggattttcagctggaaaaagcacataacctattagcggaaatgaatctttcagcgaagcagaagttaaaagagctgtccaaaggcagccggggcaggctgaaaatcgttttggccctgtcgagaaaagcatcggtcattctgctggatgagccgttttcaggtcttgatccggcggtcagggagtcgattgtcaacagtctcgtatcttatattgattttgacagtcagatcgtcgtcatcgccacgcatgagatcggcgagattgagacgctgttagacgaagtgatggttttcataaaagggaaaatcgctgaacggcgcgaggtcgaagaaattcgggaacaggaaggaatgtccgtgctgcaatggtatagaaacgtcatgcaggcgcacgaaatagaagggggattctaattggaaacggtattagaactgcaacaggtaaagaaaacgataaaaggacgaacgattattcatgatctgagcttctccgtccgggcgggcgaagtgtttggatttttagggccgaacggagcggggaaaaccactacgatcagaatgatggtcggattaatgaaactgtctaagggagacatcgtaatctgcggggaatccattacgaaaaactatgcaaaagcggtcaggcacgtcggagccatcgtggaaaacccggagctgtacaaattcctgagcggctataaaaatttacagcagtacgcaaggatggtaaaaggcgttacgaaagaaaaaatagatgaggtcatcgagctcgtcgggttgcaggacagaatacatgacaaagtaaaaacctactctctcggaatgagacagcgtctcggcctcgcccaaagcctgctgcataatcctaaggtgctgattctggatgagccgacaaacggcctcgatcccgccggcatcagagaaatcagggaccatctgaaaaagctgacacgtgaaaaaggaatggctgtcatcgtctcaagccatcttctgtcagaaatggagctaatgtgcgatcgaatcggcattctgcaaaaaggagagcttgtcgatattcaaaaagtaagggatgaaggaaaagaggataaagatacatacttcttccatattgaacaaagagaagaggctcttgccgttttgagtcagtttgactgtgtgaagaagacaaacggcattgagatccagctgtccaaacaggaagtgcctgatgtgatatcactgctcgtccgtgaaaacatccgcttatatgaagtgaaaatcatgacaaaatctttggaagaccgtttcttggaaattaccggcgggacgaaagaggaggttcaatatgtttaagctgatctataatgaatggattaaaattttcagccgcgtcggcacgtgggctatgattgtgattttaggcgtttcgatgatcggttttgcgcttctgtcaaaccatttcacctcgaacgaagccaatccgaattggaaacaggagctccaggctgaaaacaaagaaatgaaacagcagatgaaggaaaccggaaatcagacgctcattgataacctgaaacagaatgtcgcgataaatcaataccgtatggatcataacatccccgaggatacagggtacacagtgtggtcatacgtatctgattcttcgatgatgactgttttgaccgggctgtttacgattatcattgccgcaggcatcgtggcgaatgagttcaactgggggacgatcaagctgctggccatccgtccgctcagccgttttcagattttgctttctaaatatatgacagtgctgctgttcggactgctgatgcttgtgattttatttgccggctccgctctgttgggattggtctttttcggtacaggcggagatactgcggctgatgttcatctcgtatacaaagacggccatgtttttgagcaaaatatcatcgctttcctcgctaaaacatatgtctatgaatctgtctccgcttttatgcttgcgacgatggcgtttatgctgtctgcggtattccggaacagttcattagcggtcggattttctatttttctattggttatggggaacacggcgacggtatttcttgctgcgaaatttgaatggaccaaatatattttatttgcgaacacggatttgtcgcaatatatgaacgggactcctttagtagaggggatgacgatgacattttcggttgtgatgcttgtgatttacttcgttatttttctggcgcttgcattcggcgtcttcttaaaacgggatattgccacctgatataaaaaagctgttttgcctttgcaaaacagcttttcgttttagatgaaaaaaacctgccggcgtacaccggcaggtttttttaaacaatttatgcttttgttacgttagcagcttgtggtccgcggtttccttcaacgatttcgaaagaaacagattggccttcttctaaagttttgaagccttcgccttgaatagcagagaagtgaacgaatacatcgtcttgaccttctacttcgatgaatccgaatcctttttcagagttgaaccattttactttaccttctaacatgaaatttcctcctaaagcgacaaacgcttaaattcactattcttgctctaaaacaaacttccaagacgaaaactcttacaaaactttcttcttaaagatagttcgaacaaaaataattacctttactctaccagtaatccgaagaaaaaacaactgctaaatgtaacttttttcgaaataacatgttttaagaggaaaacgctctgatacggaaatctgatttgagaccagaacagcccatttgcagctgataaaaaccgctttgcagcctcttaaggaagcaattgacaaccctttttttaatcggtattgtatgtaatcatgagcccgaataccatggtgcagcttctgtacataaaaatagatagggagtaggtcaacttgaatctgcggcttataaacagtctgtttcttttcattttgatcatgtcacttacttcatgcgattatcctgacgggaaccggaccattactatcggaatcaatgaatctgatcaatcgatctgggagtttgtcgcgaaaaaagccggtgaggaaggattgcagctttctttggtaacgttttcggattatgctgaggccgatttggcacttgccggcggggatctcgacgccaatgcgtttcaatccgttactaattttaaatctttgccgcctcacgtgaaaaagaagctggcccctttaggaacgacatatgcggcatcgctgggggtgtattccaagcaacataaacggctgaaggatataccggacggagcggtcattgccgtgcctgatgaagcggcggccttcggcagggcgctttttctcatgcaggaggccggactgattacattgaaaaagggattcagcggtacggggtcaacggatatgatcaaggacaacccgaagcatctgaccttaaaaacggaaacaaaaaagaacgcctatcaggcggcggaacatgctgacgcagcagttctcagtcaaagcgaggcgaaaaaagcaggatttcatgcggagaaggacgcgctgatccgatcggcgcaaatgaaggaagcgtatattcatctgatcgccgtcagagctgaggataaagatgatgaacggatgcaaaaactcctgtctttgtatcaatcagatgataccgcggcgttgattgaaaaagaatatgagggcagcctgattcccgttttcctgaggggcggctttctcactgaaaagaaagaatgatttcctcttcgggcgatcattcttttttttcagtgctgcacacttgattgcgccctgatgttttcgctttgtacagcatccggtccgcgatcaggggcaatgtctgagggtccggtgtatttgtcggataatgcgcgatgccgagggaaacggtcacgggaattgtatctccgctcgtcagcagaatcgggttcgcgtcaatcgtgtgcctgatttcctctgcgaggtgaagcccttttgtatacgtgcaattgggcataagcacggcaaattcttccccgccgatgcgggctgacgtatgagaactgctgagtaagaacctcaggcgcgcccccagttccttcagcacttggtccccttcataatggccgtattgatcattgatctgcttaaagtgatcaatatccaaataaataagcgcgagctgagacgagggggattgagacgtccgatcgtacagaacgcgcgagacttcctcgaattttctcttattaaaaatccccgtcagaaaatcataattcgcttgaaacttgtattgcttgaacaaaacgcgggcatcggcttcgtgtttgatgatatacagtgacagcattccgcccaagatggaaatgagccaataataaacgagggccccggcaggctgttcaggcataagaaacagcagcgtcaaggtgaaaataacatttgaaaaaagcagcataacgaacgccattttatgatccggcttttttcctctgaggacggccgcagaaagtatcgcaataaccccgacggcggcgatggaaaaaatggcgcttgcattgaaattgatcaggatacggcctgcgacgataatcgcaaaggcggctgccgtagacacccagcctccgtaaagagcggcgatgataatggggatatttctgagatcaatgatggaatcggagtaagaaaagccgaaagcaatcagaaaaacccctaaaagcccgcagaccgtccccttcagtaattgaaacatcggacggtcttctttatacgaaagcgactctttaaaaagaagggtgaacagataattaaatgtgattaaaatcgttaaattaagaaacagttccttcagcataacaatcacccttatataagttactagagaaagggtggaaagaaaagagaaaaatcaataaaaatacatatattgtcaatccttacttgaccgatcggaattgatataatatagtgttaaaggataatgagcaagggagtgtttacctgttttggagaatttatttgtagtcttacatgtttttattatgcttttgcttatagcaggtctgtttgtcatgcaaaaaaaacacgtttccttttctaaacgtgtctttaccgcgctcggactaggcattgtattcggttttgcactgcaattgatttacgggccggcatcacatatcgtgacacaaacggccgattggtttaatatcgccggcggcggttatgtcaaattgcttcagatgatcgtcatgccgctagtctttatttctattctcggcgcatttacgaagctgaaactgacccataacatcgggaaaatcagcggactgatcatcggaattttgatcgccacgacagcaattgccgcggcagtcggaattgtttcggcgctttcttttgatctgaaagccgtccatatcgaccagggaagcaccgagttatcaagaggccaggagctgcagcaaaaatctgaggatatgacggccaaaacgctgcctcagcaaatcgttgagcttctgccgggaaatccgtttcttgatttcacgggagccagaccgacttccaccatcggagtcgttattttcgccgctttcctcggcatcgcttttctgggcgtgaaacggaagcagccggagcacgctgcgacgttcagcggaattgtcgatgcggtatacgcgattattatgcgcgtcgtgacgttaattttaagattgacgccttacggggtattggcgattatgacaaagacgatcgcgacaagcgacatcgacagcattgcgaaactggggatgtttgtgatcgcttcatacgccgcgcttatcgtcatgtttatcgttcacctgctgctgattacgttcagcggtttaaatccgatcacatacgtgaaaaaagcatttcctgtcatggtgtttgcgtttacgtcccgttcaagcgcaggggctttgccgcttaatattaaaacgcaaaaaagcatgggcgtccctgaaggaattgcgaacttcgccggttcattcggtttatcgatcggccaaaacggctgtgccggcatttacccggcgatgctcgcgatgatgattgcgccgacagtagggcaaaacccgtttgaaccgggatttatcatctccgtcatcgccatcgtggcaatcagttcattcggtgtagcaggcgtggggggcggcgcgacatttgcggctctgctcgtcctatccgctttgaacatgcctgtcgcgcttgccgggctgctcatttcaattgagccgttaattgacatggggcgtaccgccttaaatgtcagcggcagtatgaccgcagggctgttaacaagtaaaatgacgaaggaaaccgataccgcggtgtacaatgattcctcaatcgtcattgaagctgaagaagcttaataaaaaagcagatagcgctaaaacgaaaaatccttcatcgttgaacgaatgaaggatttttttcgtttctaatgatttccgggttcaatttcttccagcatattcatcacggtgctgtcatttaaaacatttaccgcgctttcttcgaagtgaatcggctcggtatagtgaggcttcggcgaagtttctttactgcggtctgcctgtccgtccgtatgggatgagccggagtgattgcgggaagtctgctcatgctgctgtccgccggattccccgccgaaagcctgtttgatcagctcggcaggctgcacggagcctgtttgtgaatgccgtgctttgtccgtgtgctgctgtccgccggattccccgccgaaagcctgtttgatcagctcggcaggctgcatggagcctgtttgtgaatgccgtgctttgtccgtgtgctgctgtccgccggattccccgctgaaagcctgttgaatcaggtcagcaggctgcatggagtgtgtaccatctttatgctgcattcggcctgaaaccattccggagattttccggcggatttcgggtgataaagctgcaatcagaatcgatgatccgatcagcagcgctgtcgggctgatgccgcttttttgtctgaacaagttaaatccctcctcattcaattgattacgcttacctttccctatccttctgatatttatccaaaccgctcagaatgcaaacggcgtgcataaatcccgccgaatagaaaaacctatacgtaaagtgagaaaggaggaattcacatgataaaaaaacaagcagttatttctgcccttcttctgccgatgctgattaccgcagggtgcagtatggggaaccagggagaaggaaaacgaaatgacaaccgcacccagaatgtaaattaccgcaacacacctaacgacggtgcgacaaatatgaatacagtgaaccgtcataaccaaaacaccgatcacaatgacaaccgtaacctgagagtggctgataaagccgcagacaaggtgactgatttaaaagaagttaaaaatgcgactgtgatcgttgccggaaacagcgcttatgtagccgttgttctgacaaacggacaaaaaggcgccatcgccaaccatttgaaaaataagattaccgataaggtgaaatcagccgataaacatgtccggactgtatatgtatcagcaaacccggacttcgttgaacgtatgcaaggctacggaaaacgaatccaaaacggccacccggtatccggactgtttgatgaattcggccaaatggtgcagcgtgtattcccaaaccccaataaataaatgaatggaaaagccgcatttgctgcggcttttttattttatctgccgtcacgacccagcgcttctgagcataaagtaaagaatgagatgaaaattaaaggatcggggaggggagcttgtttgcgtgacggcatggggaaacgggcggcattcactctgatcctgtgcggagtccttgtcatattggctgtcagttcagccgtttcagtaagtatgatgtacgtcctgtcaggccaaaacagccgctctgttccgacgaaggaacaagtgactgaacacatgaataaagaaatttacaaacatacagcgatttactatacagcggatgaaaagccgctcttggatctgaccaagcttacgctggaccacgcaaagcgtatcaaccaaatcattgtcggctataaaggagcggcgcctcttgaactcattttcttttcggatgaagctgaaatggagcaatactcaggattgaaaaatgtagtcggtttttattcagagcaggagcagatgatggggctcttgccagaagagaaaaaacagcttttgaaaaaagatgagctggccgttttcatgtataagcaattgattatacatgaatatacacactacgcatttcatcaaaaagcgcggcaattggggacggatacgtctgtatttccgctttggtttcatgaggggctgagcgagtgggttgcgcattatgatgtggtcattgatccgattgcattttccgtcgtgccgtttgatcaattaacgaccgaccgaaaatggcagaaatcgcgtatggaatatgaaacggatgtttatttgcaaagtttctatatgataaaggatttaaccgaaacattcggagaaggcattatcttaaccattatcaataaaaccgccgaaacacaggattttgaaaaaggctttgaagcagctacgaaagaaagcctgaaacaatttgaacatgatttcacaaaagcatatgaaaaaaagaaaacggcattggagagtcagctttccaacgccgtttttttcattaatggaggttttgctgctgctgtcccatttgtcctttaatcggaggcatttgcggctgtccctgcgccggcgcaaatgaattcagcatggtctgcatatcttgtgcattgagctgaggaacctgataataaccgtgtttgttttggtataagaagatttcatacgccatttcgacatattgctgaatttgggcggagagcactcttcttgtgacgggattggtcatttcaagcgagctcatcgtcaagagagaagcttgagctttaatcaggccgagcatatggccgcttattccgagatctttgacatcatttaatgattgattcggttttttcggctgagtcggttttataccgtagacggcctggttctgttcctccatcatatatgtcgacgtttcctgagaaggcttttggccggtcttaaagcattctgccgtcagattatagagtccgagaatgaattgatactggcggtcaagaatgtcggccagctgctgatcctgtataaactgtctgagcatcataaattgatccaaaacgccgactgttccggccagcacttcatgcatatcgaaaagctcatgtcctccgtgattcacttgcggtgaacccggaatcccctgatttactggcggctgctgctgattctgctgctgttccactggttgttttcctccttcatgtcaaatcacatttaagatgtgaaaaaagccgatccgttatacatcaagacttatttcgttacgtggggattatttactattttgcgccagcgaagacaatctttacaaaaaagtgatgtgatttttaagaaaataagctaacgtatttcttagaagacaggggggaaatgaatgaagaaaaaaaggggtttgcgtctttcgtgctgtttgctgacggtttgttttatgatgttcagcgtgaaagatgcggaagcaatcggacaagccggatcactgaatgaagctggaacggataaagcgtataaagaacggcagactgaagactccggccgtatcccgctcagaatcatcagcatgaatgatctgcacggaaaaattgatcagcaatatgagcttgaccttaacggagacggtaaaccggatggcactttcggacggatggactacgccaccgcgtacattaaaaaggcgaaagccgagaaagaacacgcctttgtcgtgcatgcgggcgatatgatcgggggcagctctcccgtgtcagccctttttcaggatgaaccgacagtagaattgatggaagacatcggttttgatgtcggaactgtcggcaatcacgaattcgatgaaggaacgaatgagcttaaacggatcatcaatggaggagatcatccggacggtaaggggacaagcggttatgacggccaagatttcccgctcgtctgcgccaactgtaaattgaagtcaggggagtcctttctgccgccgtatgaaatcaaatacgtttccggaattccggtcgcatttatcggggttgtaaccagatcggcggcaggcatggtcatcccggacggaattaaaaatattacgtttacggatgaggtaaaggccgtcaatgacgccgccgcagacctgaagaaaaaaggaattaaagcaatcgccgtgctcgcccatatgtctgctgaacaaaatggctcagccatcacgggagaatccgcaaagcttgcaagcggaacagactcagagattgacgtgattttcgccgcgcacaatcataaagtcgtaaacggagaaatcaacggcaagctgatcgtgcaggcatttgaatacggaaaagcaatcggaatcgccgatctcgaactagataaagagtcgaaggatatcgtgaaaaaatcagcggaaatccaatatatcgatcaaagtaaaatcaagcctgatccggatgcggcaggcatattaagcaaatatgaagagaaagtgaaaccgattatcagcgaagcggtcggggaagcggcccatgatataacgggcgggtattcaaatgacggcgacacggcgctcggaaatctgattgccgacggtatgaaagcgaagatgaaatccgattttgcgcttatgaatgggggaggcatccgggacggcataaaaaaagggccgatcacatggggagatctttataatgtacagccgttcggcaatgtgctgacgaagcttgaaatcaaaggaaaagatttgcgggagatcatcaacgcgcaaatttctccggtgtacggaccggattacagcatcagcggattttcctatacatggaacccggaaaccggacaagcggcggatgtgaaaatggcggacggtacagacatacagcccgaaaaaggatatacagtaacagtcaatcaatttatggcgacggcagcgggggcaaaatacggtccgatcgggaaactcggcaagaatccggtgacggggcctgaggatttggaagcgacagtagactatgtcaaaagcttttccgcaccgatttcttatcaaaccgacggccgcatccgcacggcatcagccgccgaaacacctgatgacaccggcaatcagccgggaagcggggaaacaccgggcagcaccgggcctgataaaggagaaaaacctcaaacggaaaaacccgctaaaaaaccggatgcagcagaacagcctgatcaaaccaaaaaacctgaacgtcctgtcgtaaaagaagcagcatctgatacagtgcagtcaattcccgaatcccgtacggcgtctgccgcagattcggaacaaagcacagaacagactgaaagcggcacacaaaaaggccgcccattgcctgatacttcagcgggcagccatcagacggcattggccggcctggtgatcacgggtgccggcgtatattggcttttcagaaagaaaaggggaacccgcacacgatgaacaaactgaaacatattccgcttctcgtcatcatcgcaggtgttatcatcacatgttacggaagctggaagatcattgattcacatatgaaaacgaaccaatcgcttgaagaagcaaaaaaagcaacagaacctgtcttggaaaagaacgaaacaaaaagcgctgtgcaggcacagcgcaaaaaagaatttcaccccgaaacgggtgaggcaagcggcattttagaaatccctgaaattgacgctgagctcccgatcgtcgaagggactgacgcagatgatttagcaaaaggcgtcggacattataaggacagctattatcctggcgatcacggccaaattgtgttatccggccacagggacacggtgttccgccggaccggcgaactgaaaaaaggagacagactgaacgtgattttgtcttacggcacgttttcttataaaatcagccgtacaaaaatcgtcagccgggatgatacgtctgtcatcacccttcaacacaagcgggaggaactgatcctgaccacttgctatccgttttcttacattggaaatgcgccgaaacgatatattatatatgccgacccggtttaagaaaaatacgtttcggtaaaatgagccagatcagccggcatcggcgcctcggcaacgatttcttctcctgagatcggatggacgacactgacttttttggcgtgaagcgcctgcctgtgaaacagcgccctgcttccgccgtacaggtcatcgcccgccaacggatggccgatgcttgccatatgcaccctgatttgatgtgttctcccggtttccagttcaagctctgccaatgtaagctgcgcaccgggatgatagcccttcactttgtaatgggtgacggcggcttgtccgccgggtgagacgcgccgtctgacggaatgtgacctgtcgcggccgatcggcgagtcaaccgtgccttttttcggcgtgacttttccttccgccgcggcgatataggtgcgttttaatgttttggtttcgagctgacggtcaaggattgcatgggccaggcggtgtttcgcgaaaacgaccgcgcctgacgtgtcacggtcaagacggtgaacgtggcgcactttcgcttgttcgccgttgatttgaaaatggtaagcgatcaggttgctgagggttccggtctgaccctcttcatttggatgagtcggcattcccgccggcttatttgcaatcagcatatgactgtcctcaaataaaatgtccggctctccgtattcaggaattaccgaagaacccgttttttcctgaagatcaatgaataagcggtctccggttttcagtatgatgttgtttttcggggatgtccgattcacctgaatgcttttttggttcatccattccgttatcacgggttttgacgcctggaattcagatttcaggactgaaaacagccattgtccggcgtgtttttccgtaatcaggagttccagaccgcggtcattttgtttcatatcataaagctccttttcaagcggaaagcggctgtttcaataggaaacacttaccttagctttcgcgtttttttctatgctattcttgataaagattaaggatattcacatggcaagaaaggtgattgatgtgagaattgtgaacgcagcgactgacggacaagaaagcgcgatacaagagctttcctctgaattgtttcaaaatgtctttcctctttatttctccgaactggaaattcagcgctttaaaaaaaggggcgtattgtctttacaaaaccaacgttaccaaggaactttaaaagaagcgtttcaaattatggcttgtctgcaaacggtacatatcatgctgtcaaagccgcaccccgtatatgacgtcaaagagcgggcgctgtttgataaaaattgcgctttgctgaatgaatgcggaatgaattttccctttacctatgatgatttcgagacaggggccggatcagaagcctgcggtcacagaaggctgatctgacgggtataaagagccttttgacaggctcttttttgcttccttgacatgataccacaatttctttcctctaactccctttataatgagtcaaatccccgagcataataaaatgcgaaaggggtgctttacaatgagttcaatcaaacaatcaatgactacccacgtggctaccgtttctcccaaccaaacgatccaggaagcggctgcgctgatgcaccagcataatgtcggagcaattcccgtcgttgacggaggggaattaaaaggaatgctgacagaccgtgatatcgcattgagaacaacggctcaaggccgcgacggccaaacacctgtttcacacgtgatgtcttctcaagttgtatccggaaacccggaaatgagtcttgaagaggcgtcacatctgatggcccaacaccaaatccgccgccttcccattgtcgatcaaaatcatctggtcgggatcgttgcgcttggagacttagcggtcgatcagcgttcaaatgagtctgcgggagcggctctttccaatatttccagtcaaaacacacagtaacggatgaagagagcttgcactcatgcaggctcttctttccgtgagaatgttacattttgaatgcaaaagaaattcacggtatagtgtatacataggtcagtacgtttagctaaaggagctgtaaccattgataaaagcattaatctttgattttgacgggttaattttagatacagaaacccatgaatatgaagtgctgcaggaaatgtttgaggaacacggttcaacattgcctttatccgtctggggaaaggtgatcggaacggcggcggggtttaagccgttcgcatatttagaggagcagctgggaagaaagctcgatcatgatgaactgacggcgatcaggcgcgggcgcttcgaacagcggatgaagacggaaacggcgcgtcccggagtggaggcttatttagccgcggcaaaagaattaggattgaaggtggggctcgcttccagctcagattttaaatgggtgtcgggccatctgaaggaattaggcctgtttgatgaatttgaagtgattcagacggctgacgacgtagaagaagtgaagcccaatccgaagctctatctgaaagctgcggaacatttaggcgttgaaccttctgaatgtcttgcctttgaggattcggtcaacggctcaatcgcagccaaacgcgccggcatgaaatgtgtcatcgtgccgaataaggtaacgagcgccctgttatttgaagaatacgatcacagactggaatcgatggcggaaatggaacttgaattactcttacagcgattgaacgatcaaaacgaaccggcagggggaagcagcattgtctgagaaacttgatctgacccgttttgaaaagaaaatggtcatacggaatatggaagagaaagatatcaacaaaattattgagctgcaaaaggattgttttccggggatggagccgtgggagcctgagcatttaatcagccatctcgcgcactttccggaaggtcagttttgcgccgagtatgaaggggaaattatcggttcatgctcaagcctgatcatcaatttcgatgaatatgatgaccgccacacgtggcaggacattacagacgacggttatatcacgaaccacaacccggacggattgaatctgtacgggattgaggtaatggttcacccggaatacaggcggatgaaaatcggacaccggctgtatgaggcgagaaaagacttggcgagacgattgaatctgaaaagcatcattatcggcgggcggattccgaattatcataagtatgcggaagaaatgacggcgagagcctatgtcgaacaggtgacgcgccatcagatttatgacccggtgctttctttccagctgatgaacggatttacgctcatgcggatcaatccgaattatctcccggatgacaccgcgtccattaaatatgcgacattaatggaatggaacaatgtcgattatctgccgcagtcaaagcgctattacaaatcggcatttccggtgcgcatctgcgtcattcaatatgaaatgaaaaagatttattctttcgaggaatttgccaatcaggttgaatattatgtcgatgtggcttcagatgcgagatctgatttcgcggtattcccggagattttcacgacgcagcttatgtcatttctcgaagagcgttctccgagtctggccattcagaggattaccgaatataccgaggactatatcagcctctttacagatctcgcggtgaaatataatgtgaacattatcggcggctcccacttcgttgaagaagaggggaaaatttataacatcgcctacttattcagacgtgacggcacgattgaaaaacaatataagcttcacattacgccgaatgagcggaaatggtggggcatcagcgccggagacagggtgcgcgtatttgatacggactgcggaaagatcgccattcagatctgttacgatatcgaatttccggagcttgcgagaattgccgcggatcaaggggcgaaaattatctttacgccattctgcactgaagaccgccaaggctatttgcgcgtaaggtactgctctcaggcgagagcggttgaaaaccaaatttacaccgtcatctcaggtacggtcggaaacctgccgcaaacagaaaatatggatattcaatacgcgcagtcagccatttttgctccgtctgattttgaattcgccagagacggaatcgtcggtgaaacgaatccgaatatcgaaatggtcgtgatcggggacgtggaccttgaaatcttaagaaggcagcgtgaaaacggaaccgtgcgccagctgaaagaccggcgcaaagacatttaccggattacgcatctgaaataaaaaaacgcccgccccgcttaagggcgggtttttttataaaaacacttgcaccggccccggtttcgggatatgctcttgtagccctttcgctttctgggagaaagcgtttttttaattgccgccgctttattgactcgcccatgccgcgcctttatattcttattaagaggaaaacttcaccatgagaatcggcgtcagaagccgggcagctttcgatacagtgcaatgatattgaaagggagatgagcggtgtggaacatgtacaaaaaaatcagtcactcaaacaaaaggataaagagctgatttggcacgcgatgaaaggggcggagccggatgacagcataatcgtccaaaaaggggaaggcgcctgggttacggacattgacggcagacggtatttggacggcatgtcaggattgtggtgcgtcaatatcggatacgggagaaaggagcttgccgatgcggcttacagccaattgaaggagcttccttattatccgctgacccaaagccatcaacccgcgattgagcttgcggaaaaactgaatgaatggctcggcggcgattatgtaatcttcttttccaacagcggatcggaagcaaatgaaaccgcgttcaaaattgcccgccaataccacattgaaaacggcgatcacagccgcttcaaattcatctcccggtacagaggctatcacggcaatacgatgggggcgctcgccgctaccggccaggcgcagagaaaatataaatatgagccgctctcacaaggttttttgcacgcggcgccgcctgatctttatcggaatcccggcgatgccgtcacattggaaagcgcgcatgaaatcgaccggatcatgacgtgggagttaagcgaaacgattgccggcgttattatggaaccgattattacaggcggagggatactgatgccccggacgggtatatggcaaaggtagaggacatttgccgccgccacggcgcgcttctgatcagtgatgaagtcatttgcggtttcggccgcacgggagagccgttcggatttcagcattacggcgtttcaccggacatcgtcacaatggcaaaaggcattacgagcgcttatctgccgctgtcggcaacggcagtaaaacgggagatttttgaggcgtattcgggcggtgagccgtacggccgcttccggcacgtgaatacattcggaggcaatccggcagcctgcgcccttgctttgaaaaacctgcaattgatggaggacgaaaatctgatcgcccgctcccgggagcttggagaacggctgctccgtgagcttgagccgctcaaagaacatccggcggtcggcgatgtacggggcaaaggccttcttgccggcattgagctcgtcaaggacaaaatcacgaaggaacccgctgatgccgctcttgtgcagcacgtcatcaccgcgtgcagagaaaaaggcctgcttgtcgggaaaaatggtgatactgtagcgggatataataatgtcattcagctgtcaccgcctttttgcctgtccgacgaggagctctctttcatcatttcgaccgtcaaggaaagcgtgctgagcattgatttttaaagtaaaggagtaaaacatgagttttcacaaccagaagattctaccggctatccggaacatgaagcaattcgatgcatttttagagagtccgttcttatacggcgtcattttagatatacacctcggtcaattaaaaggtgtcgtgaatgaagcgaaaaaacacggaaaacttctgatggttcacgtcgatttaattcacggcattaagcatgacgaatacggtgcggagttcatttgtcaggacatccggcccgcgggcatcatttcgacgagatccgccgtcatcgtcaaagcgaaacaaaagaaaatatacgcgatccagcgtctgtttctcttggatacgagcgccatggaaaaaagcatggaattcgtcggaaagcataagcctgactttatcgaggttctcccgggcatcgttccgactttaatcagagaaattaaagaaatgacggggattccgatttttgccggcggcttcatccgcacggagcaggacgttgaaaacgccttgcaggcaggagccacggccgtgacgacttcagacaccgaactatgggctaaatatgaacattctatgacaaaaaaagattgacaccgcttacacccattgttacaatagacctaggttaatactatgtgatggagacccggagacccacaacagctctttacggaagcaataaagcgtaaagcggtttgttgtgggttttttattctctataactctgtcaaacctgctattttgtcatttaggaggaatgatgatgacagcattttggggagaagtaatcggtacaatgctgcttgttattttcggcggcggcgtttgtgcgggagtcaacttaaagaaatcgctttcataccaatccggatggattgttattgtattcggctggggattgggagtagccatggcggcatatgccgtcggcagcatcagcggcgctcacttgaatccggctttaacgataggccttgcgcttgaaggcagctttccttggaaagacgtccctgtttatattgcgggacagatgatcggagcaatgatcggtgcggttgttgtgtaccttcattatctgccgcattggaaggcgacggatgatccggccgctaaactgggcgttttctcgaccggcccgagtattccccatacatttgggaatatgataagtgaagtcattggtacgtttgtgcttgtgctcggcattttggcaatcggagcgaatgaatttacaaaagggctgaacccgctgattgtcggattcctcatcgttgccatcgggatttctcttggagggacgaccggatatgcgatcaaccctgcgcgggatttggggccgagaatcgctcacgcctttctgccgatcccgaaaaaagggccgtcaaattggaaatatgcctggattcccgtaatcggtccgatcatgggcggtgcgttcggcggcgtattttacaatgccgcgtttaaaggaaatgtgacacctagcttttggtttgtaagcgttataatggttgtagtgcttttcatactctatatttataccaagaaatctcaatcacagaaaacattatcaaattctgaatatatttaaaaaggagagcggcatcatggagacctatattttatcaattgaccaaggcacaacaagttcaagagcgattctttttaataaagaaggaaaaatcgtgcattccgctcaaaaggaattcacacagcatttccctcagccgggctgggtggagcacaatgcgaacgaaatctggggatcggtgctcgccgttatcgcgactgtgatttccgagtccggaatcagcgctgatcaaattgccggcatcggcatcacgaaccaaagggaaacgacggtcgtatgggataaagataccggaaagccggtatacaatgcgattgtgtggcaatcgagacaaacatccggcatttgcgaagagcttcgtgaaaaaggatataatgatacattcagagaaaaaacgggacttttgatcgacccttatttctcaggaacgaaagtcaaatggattcttgacaatgtagaaggcgcgcgggaaaaagcggaaaacggaaatcttctgttcggaacgattgattcatggctcatctggaaaatgtccggaggcgcggcgcacgtaacggattattccaacgcttcaagaacgctgatgtttaatattcatgaattaaaatgggatgacgagctgcttgatattttaggcgtgccgaaatccatgctgccggaagtgaaaccgtcttctcatgtgtacgcgaaaacggttgattatcatttcttcggtaaaaatattccgattgcgggagcggccggagaccagcagtctgcgctgttcggtcaggcgtgctttgaagaaggcatggggaaaaacacatacggcacaggctgctttatgctgatgaataccggagaaaaagccatcacttctgatcacggccttctgacgacaatcgcctggggattagacggaaaagtcgagtatgcgctggaaggaagcatctttgtcgcaggttctgccatccaatggctgagagacggcatgcggatgttccaggattcgaaagaaagcgagacatacgcagagcgtgtggattccgctgacggtgtttatgtcgtgcccgctttcgtcggattgggcacaccgtactgggacagtgacgtgcgcggctcagttttcggcctgacacgcggaacgacgaaggagcattttatccgtgccacgcttgaatctctcgcatatcaggcgaaagatgtgcttgatgccatggaggctgattcaggcatctctttaaaaacattgcgtgtagacggcggagcggtaaaaaataacttcctcatgcagttccagagcgacttgcttgatgtgccggtcgaacgtccggaaattaatgaaacgactgcgctcggtgccgcgtatttagccggaatcgctgtcggctactggaaggacagcactgaaatcgccgatcagtggaaccttgataagcaattcaaaccggaaatggaagatgaaaaacgcgttgaattgtacggcggatggaaaaaagcagtaaatgcagctatggcttttaaataagataaaattatggtatactgaaaacaagttaataggaacggtcctgagatgaggagagaccacagcaccaaagtgatgacatgcgctttggctgttgtggtctctttttctataccgtgacaacaaggaggaagcgtaatgatgaatcaccaattttcaagtttggaacgggatcatatgctggaagacatgactaaaaaacatacgatctgtttattataggcggaggtattacgggtgccggtacggcgcttgacgctgcttcaaggggaatgaaagtcgctttgagcgaaatgcaggatttcgcggccggcacatcaagccgatccacaaagcttgtccacggcggtttgcgttatctgaagcaatttgaagtcaaaatggtggctgaagtcggtaaggaacgcgccatcgtgtacgaaaacggcccgcacgtcacgacgccggaatggatgctgctgccgtttcataaaggcggcacgttcggttcattctctacttcaatcggcctgcgtgtgtatgactatttagcgggagtaaaaaaatcagagcgcagaagcatgctgtctgctaaagaaacgctgcaaaaagagccgctcgtcaaaaaagacggcttaaaaggcggaggctattatgtagagtaccggacggacgatgcgagactgacgattgaagtcatgaaagaagccgttaaattcggtgctgagcctgtcaactattctaaagtgaaagaactgctttatgaaaaaggaaaagttgtcggcgttttaattgaagatctgctgtcaggcaaggaatacaaagtgtacgccaaaaaaatcgtcaatgcgacaggtccgtgggtcgacgaactgagagaaaaagaccacagcaaaagcggaaaacatctccagcacacaaaaggggtccatctcgtattcgaccaatccgtattcccgcttaaacaggcggtgtactttgatacgccggacggccggatggtgttcgccattccgcgtgaaggaaaaacatacgtgggtacgaccgatacggtttacaaacaaaaacttgagcacccgcgcatgacggtgcaggatcgcgattatgtcgtcagctccatcaattatatgttcccggaactgaacattacggcggacgatattgaatcaagctgggccggcctcagaccgcttattcacgaagaagggaaagacccgtctgagatctcccgtaaagatgaaatctggacatctcaatcaggcctgattacgatcgccggaggaaaactgacgggctaccgtaaaatggctgagcacattgtcgatcttgtccgcgaccgcttgaaagaagagggcggccaggacttcggcggctgcaagacgaagacgatgccgatttccggcggacatgtcggcggctctaaaaacttcgagtcatttgtggaagcaaagacaaaagacggcttgaaaatcggtttatcacaggaaaccgctaagcagttagccatcagatacggctctaacgttgaaaatgtattcagccggattgaaggcctgaaagatgaagcggaaaaacgcgagattccggttcacattctggcggaagcggcttacagcatcgaagaagaaatggctgcgacacctgccgatttcttcgtccgcagaacgggaagactgttcttcgacatcaaatgggtgcaaacgtataaaacggccgtgattgattacatgagcgaccgattccaatggaatgacgaaacgaaagaaaaacacactgagtggttaaatacgctgctgcacgacgcggttgttccgctcgaacaataataaccggagggctgtgccgaaaaggcatgagcccttcttttatctttttacataaagcatttggttaagttatcaagtgacacgggcagccgcttcatattaaaatatggtcataagctgaaattataggaggacgaacatgagttggagtaagagttacgaacgctggaatcaggccgaacaattagattcagaattgaaaaaattattggcggacgcagaaggaaacgagcagctgctggaagattttttctacaaaaatcttgagttcggaacaggaggcatgagaggagaaatcgggccgggtacgaacagaatgaacatttacacggtccgcaaagcatccgccggacttgcggcgtatatcgcgaaacagggggaagacgcgaaaaaaagaggggttgcgatcgcatacgactcccgtcataaatctcctgagtttgcgatggaagctgcaaaaacccttgcttcccaaggcattcaaacatacgtctttgatgagctccgcccgacgcctgagctgtcttttgcggtgagaaagctgaacgcttatgccggcatcgtcgtgacggccagccataacccgcctgaatataacggatataaagtgtatggcgatgacggcgcacagctgccgccgaaagaagcggacatcgtcattgcggaagtgaatgccatagaaaatgaattaacgattcaagttgaagatgaacagtcgctgaaagaaaaaggtttgattaaaataatcggtgaagaaattgataaaccgtatactgaaaaactgacttccatctccgtacatcccgagctttcggatgaagtggatgtcagcgtcgtgttcactccgctgcacggcacggcaaataaaccggtgcgccgcggtcttgaagcactcggttacaaaaacgtcaccgtcgtaaaggagcaagagctgccggacccggatttttcaaccgtcaaatcgccgaatccggaagagcacgcggcattcgaatatgccattaagctcggagaagaacaaaatgccgatattctcgtcgctacggacccggatgccgaccgtctcggcattgccgtaaaaaacagcgaaggcaagtacacagtgctgacgggaaaccagacaggcgcgcttttattgcattacctgctttccgagaagaaaaaacagggcacccttcctgaaaacggtgtcgtcatgaaaacgattgtcacgagcgaattgggccgcgctgtcgcttcatcgttcggattagatacggttgacacgctgacaggcttcaaatttatcggtgaaaagatcaaagaatatgaaaaatcaggccaatacacgttccagttcgggtatgaagaaagctacggctacttaatcggcgatttcgcgcgtgacaaagacgcgatccaggctgcgctgttagccgtcgaggtatgcgccttttataaaaagcagggcatgtcgctttatgacgcgctgctgtccatttttaaagaatacggatattaccgtgaaggcttgaagtcattgacgttaaaagggaaacagggagcagagcagatttccgctatcctgacttcattccgaaacgatccgccgaagcagatggccggaaaacaaatcacgcaggctgaagactattcaacgggaaaacggactgtatttgccgatcatcttgaagaagatattgatctgccgaagtcaaatgtcctgaaatatttccttgaagacggctcttggttctgccttcgcccatcaggaacggagccgaaagtgaagttctatttcgccgtgaaggggacttctttacaagacagcgaacagcgtcttgccgcattatctgaagccgtcatgaaaacggtggatggcatagtggaaaaaacgaaataaacaacaaaccgccggaagcgacatccggcggtttttttatacgcctcatccgaaagtatgaggaaaattcatgctgaaaacaaaggaatatacagaaaagaattgatataatatggataattctgattggccggagtgagggaaattgacgaaaacgacggtagaaacgttaaaaacgttaaaagcgattgcggaaaccttaaaccaaaaccacgatttaaaggaagcgcttgataaagtgctccgcgaactgctcagcctgaccggactgcagacagggtggatttttctgattgagccggacgggtcttatacgctcgccgcatccgcttatttaccgcctgctctcggtcagcgggaaaatgcactcatgtgcagcggggaatgctattgtctgaccaaattcagcaatggcggattgacaaaggccgtaaacataatgaattgcaaacggattgaatttgcggaacagacgacgaactgccgcgatacggagggcattacccatcatgcgaccgtaccgcttgaggacggcggccggaagttcggatattgtgcctcacgtgctgacccatatggttcaggatgatcaggataaggaaaaatattatcagctgatcccccgtgaaaaagatgttcttcaagaaatagccaaaggaaaaagcaataaggaaattgcggcggccctgtttatttcagaaaaaacagtgaagacccacgtgtccaacctgctgtcaaagctgaatctttccgatcggacgcaggcggcattgtatgcggtaaaatataatgttttgggaaaggcggtaaaatcatgagcatattagtgatcagcggcacaccgagaaaaaacgggcggacgagaattgccgcttcttatatcagagatcggtttcataccgattttattgatttgagcgaaagtgaactgccgctttataacggtgaagaagaacagaacgagctgccttcagtgcaaaagttaaggcggcaggtgaaaaagtcagcggccgtcgtcttattatctcccgagtatcacagcggcatgagcggcgctttaaaaaacgccatcgattttttaagcagcgatcactgggcatacaaaccggtggccgtcattgccgcggcgggcggaggaaaaggaggcatgaatgcgctggcgaatatgcggacggtcatgcggggcgtctatgcaaatgtcatcccgaaacagctggtcttagacccgattcacatcgacatggagcgccggaccgtatctgaggatatggcggtcagcctgaaagacatgatcgaagagctgaatatgttcacaaacacaagaaatcccggcgtctgacgccgggattgttttatgtcagcatggctaattgatcttcataagcgagctctgtcgcatgatcaatatacccgagaagggaatacagctctttttcaagcacggcatgatcatattcgaaatgatacgcgtgtagaaagtgctcaatacgctttgataataaatcatcttttgtacgaaccatcaaaattaataaattgtcccattgagaccggtgtgtgtaatacaaggctttatcataatcggcatgatccatcttacgcttctcctttcaatgagaagttctccgttagtttatgccgccgaagcccggatgcaacgggggaaaacttggtgtccttatcactgcggcatagcaatatgagggagacataaaataaaaccgcatatccgtctcttctttggacacgctaagattgacaaaaaacgactcaggagaacataaagatgaaatcccttccatttgcgcttgccctcttgttttgcggcattctcattgcctctatcgctgaaaaagggcatacagaacacctcgatccgtcagttgaaaaatgggaacagctcgcatggaaccagcttgaacgtgaatacaagggggccgagcttaccgattattcgtacatgggccgtacaaaagtgaaccgggaacagacgaaagacgtgtttcgcgtaacggtgcaaaccgcaaaagaaacgttttcatcccgtgctgaagtgtatttccatcccgtaacaaaacacgtgatcagcatcaatattttcagactgtaaaaaagctgcacagccttatgcggccgtacagcttatcaggtatcagaagaaacgttttgcgccgaggtagcgctgtttccaataggaattgttcatgctggaaataacgactcccgaatcgttggcattaataaactggccgttcccgagataaataccgacgtgggaaggtccggctttataagttgagaaaaagacaaagtcaccgaccgccggctggctgactgatgtcattgtattccagtagcctgcggctgaaagtctggatacagaagtgaccttattgagaacgtaataaatgaaaccgctgcagtcaaagcctctcggcgtcgttccgccccatacatacggtacgcccagctgagcttttgcggcatcgatcattacattaatcttcgcgcttgttgaacctgtgccgcctgtgctgccggactgattcggtgtcgtgtttgtctgctgcccggtaatcgtcagtttctgtccgatttgaagaacatctgttttcagattgtttttctcgcggatctgctgggctgtcacattgaacttttgggcgatcacccataaagaatccccgcttttcacggtatatgtagtggttttccctgtatttccggactggttcggagctgacggtgaagacgaagagccggaagaagacgttttggtcagcttcagcacttgtccgacccgcagcatgtctgacgtcagtttgttgatgcttctgatttgctgaaccgtcatattgtatgcgtttgcgattttccagagtgagtctccgctttttactgtataggaggacgtttgcgtctggttttgattttggtttgaattgtcttttgacggcgtgtttcccgaagaagacgttccttttgttttcaggacttggtttacgtagatcgtatccgtttttaagttgtttaatactttgagttccgcaatggtcatattgacgctgtttgcgattttccatagtgaatcgccgagttttactttataggtcccggaagatgatgactgctttttgctgctgtttgagctgctgccaggagcggtttttttctgatcggtgcttgaggaaactttccccgtcacttgcagcttctgtccggcgcggattaagtcgcttgtcagaccgttcaattttttcagttcctgtacggacattttaaaatcagatgcgatcagccacagcgagtctccgcttttcactgtatagacgcttttagtcgtgccgctgttctttgaagatggctttttgctgccggaatctgatttgccgttaggaatgttgagcgtctgcccgatagaaagaacggtggattttagatgattcgctgatgtaatggcatccacgcttgtattgtagttttgggcaagcttccataatgaatctccgcttttgaccttaatcgtttgtgcttctgccggtgttacagctaacgcagacccgacgatcgcagatgcagtcaaaccgaccgctaccttttttttcatagtgaatctcccttttcctgcgataatttttctatccccattcgttgcagccgcaaggtgaggatatcagtaatgataatctttatatcggcacttgtctgcaatcgtttatcatattaatagaaatagtccttttttcttatgccggcataaaaaaagaaggaatgcggacattccttcagcttctgagcagtctcataatctcctctttgtttttgaccagatcccttaacgtatatttgtctaaaacggccaggtaagcttgcagggcttcattcagaaggttctttaagttgcaggcgggagatatgatacagagattttttttggagtcaaagcattctacgatgttaaagtcgtcttctgtatgtcgaacgacttctccaatgtttatgtcttccggtgtcattcctaatcgaattccgcctccccggccccggatcgtttcgacatatccgagctggccgagacggtaaatgactttcatgaggtggtttttagagatggaataagtatctgcgatttcttttatgttggaaagttcgtcggaatgtctggaagccaaaaaaatcaaaacgcgtaaagagtaatcggtatagttcgttaatttcatagaatgacctcgaaaaaagagattttgcttctgttacagtctatcatatatgaatctaaaatgaaaaaaaaggaatttgcccccttaactcaaaaaaaacgtgcgctccttctgagcacacgtttttttcgttaagacatcggcggcttacgatcgtcagccgattgatgtttttcaattttgcgatccaattttgcgagataacgggaggcaaattcttttccgccaagaccgaatgaaagtccgaaggcaagcgcgaaaccgcccagaatcagaataaacgcggcatttacgatcgtgtcggcgacaccgagctgatccagcgccataaagattgagagagtgataatggtatatttcgcaagcggcgccaggaatctgaattcctttccgctcagcatgccggcaagcagcctgctgacaagctgtccggccaaaagtccgattccgagaataaatacagcggccagaacattaggcaggtaagcgataataccggttgcgataacgacgagaaattcgagatgaacaagctgcagcgcctctgccgtaaagagcaggacgatgatgatctgaacaatcatgccgaccgtctgagaaagcgtcagcttcggggtgcccgcctgttcaaagcccattttaccgagaagagagtcgaaaccggcccggtgcaggagcccggatacaatgctgctgacccattttccgacccagatgccggcgatgatcagcacaataccgatgatgatattagggagcattgtgaagaccgtgtgcagcatggctgacgccggttcagaaatacccgccacatcaagccggtcaagcgcagagatgatcaccggaatgaaaatcagcacgtagacaatcgttccgatgattgccgacaggctcgtatccttcagataaatagaaagccccatacgtgcggcgagcctttccgttccgatactcgccagaaagtttgtgacgatatcacggacgagacgggcaacaagccagccgattaaaacaatcagcgccgcggcgaataatttcggtataaaggacaaaacgctttgaatcatatttgtaaacggccctgacactccgctgatctggagagcggacaagacgccgggcaggaacaagagcaagacgaagtaaaaaacgattcgtgaagcggccgtaacggatctgctcatctccgcttcttcagacaccattgtccattttctgagccggccgttttcagcgagtttcatgcccgcttttttgacgagatagctgaaaagcgaagcggccgcccagcccacgagcagaatcaagccggcttttaaaacgctcggcacagccgccgttatcgccgacagcatgctgacaaaaggcgaagccacggttgtcagatgcagaatgttaaagaatagaataaaaacgatgattaatgcgataaaataaatgactttactgatgactttttctgaggaatagcgcgccggctttttttcggcgaacagcctgtcgtcgatttttgttttttgcaggcctttgtatacggctttttcaatgattttggcaatgccccagccgataagcaggacgagcagtgcaatgatcagattcgggagtttgctgagatacgtcgtaagcatgtctgctgtattcaagtagaatcgctccttttctttttggggtatggtgtgtgttttacccacttacatataaagcaaacagggcggatgtgccgaaagttttcagtcggaaaccggtctgttatttcatcttttgagaggaggggtcatacattataaataagtccaagtaggggggattcgcttgaacgcggaggagacaaaaggtttacagcgggcaattgaggaaataaccgacattgcaaagggtttcggccttgatttctacccgatgagatatgaaatttgcccggctgaaattatttatacattcggcgcgtacggcatgccgacgagattcagccactggagtttcggcaaacaatttcataagatgaaactccattatgatctcggtttgagcaaaatttatgaacttgtcattaattccaacccttgctacgcttttttgctggacagcaattcgctgatccaaaataaattaattgtagcccatgttcttgcccattgtgattttttcaaaaataactgccgctttcaaaatacgaaccgggacatggttgagagtatggcggctgcggcggagcggattaagcattatgaaagaattcacgggataaaagaggtggagtcctttttagatgccattctggcgattcaggagcatatcgatccgtcgctcgtcaggccgaagctgctgtggagcgtcgatgacgaagaggaggacgaagaagaaaccgcgccatcgccttacgatgatttatggggaatggataagccgaaacaggtgaaaaagaaaagagggaaaaaaccgtttccgccccgtccggaaaaagatattctgctgtttatcgaggaacattcgcgggagcttgaaccgtggcagcgtgacattttaaccatgatgagagaagaaatgctgtatttctggcctcagctggaaacgaaaatcatgaacgaaggctgggcatcctattggcatcagcggattatccgcgagcttgacctgacttcagatgaagccatcgaatttgcgaagctgaacgcaggcgtcgttcagccgtcaaaaacgggaatcaacccgtattatttagggctgaaaatttttgaagacatcgaagagcgttatgacaacccgacagatgaaatgaaaaaaacaggggtaaagcccggttccggccgcgagaaaatgtttgaggtcagggaaattgaatcggacatatcatttatccgcaattatttgacgaaagatctcgttatgcgtgaggatttgtatttattccaaaagcagggcagggactataaagtgatcgacaaagaatggaaggccgtgcgcgaccagctcgtgaacatgcgggtcaacgggggatttccttatctgaccgtcaatgacggggattacctgaagaataatgagctttatattaaacattggtatgagggaattgagcttgatctgaaatatttggagaaagtgctgccgtatctgtaccagctgtggggcaggagcgtgcacatcgaatctgttcttgaagacagagaagtgatgttttcgtatgacggcaaaggagtgcaccggagatatttgtaaaagaagaaaggatgcggggaaatccccgcatccttttttattttccgtgtttcaggatgtgaaagatctttttggcctggtccgtgttgtttaaaagccccgtaaatgactctcttcccggaccgtatgcgtaaacgggaacttcttcgcccgtatgatcgccggttgtccagccgctgtttgttttcgcattaaaaagcttaatgatcgctttgtagacgctcttgtcagcatcctgttttgcggccgtttcgatctgtttaatttccgcttttgaccatttcaggtctgtataacgcgcaagcacggaagatacggatttgcccgctttgatttggtcagccataaatgccggggtttttttggcggcaagaatcggttcaacatgccagtttttatcgtcattcgcgccgatcgtcaatccgccggtggtatgatcagccgtggcaacgacaagcgtatgtttgtcctttttggcaaatgcgatcgctgctttatacgctttttcaaaatccttcatttcactcattgcgccgactatatcattgtcatgtcccgcccagtctatttggcttccttcgaccattaagaagaacccttttttatttttgttcagcctgtcgatcgccgccgttgtcatgtcttctaatgaagggacagcgtttgaccggtcgattgctttgtcgagtccgccatcggcaaacaggccgagaatcttcttgttacggtcctttttcagctcctgttttgatgtcacgtagctgtatcccgcttttttgaaatcctttgttacattgcggtctttacggataaagtttgatttgccgcctccgaggagcacatcgactttttgttttccgttgatgcggtcatcaaagtagctgcttgcgatctcatccatgttctttcgggatttgttatgggctccgaatgccgcaggggtggcgtgggcaatctccgaagttgcgacaagtccggtggatttccctctttgtttcgcttcttcgaggacggatttgacccgctttccttttttatcgactccgatcgccgcgttatacgttttcacgcccgtggccattgccgtgccagccgccgcggaatcggtaatattggaatcaggatcgtcaggataagtcatcatcataccggcgagattggggtcgaatgccgtcagtttcataccatccgaaggctttcctttgttaatgaccgaacggtaggcgttcatatagggtgcgcccattccgtcgccgaccatgaagatgacgtttctgatctcgtttttgtcaggctgtttttttgccgcagcctgttcagagtgctgaaaccccgcgcccgcaatcagaccggctgtcagcacggatacggctgccgccggcagaagttttgatcgaacctgtttaaatagactcattctcactcgtcctcctttaatcgtgtctgcatgtctaatggtagggggtgtttgtaaagagcgcctgttcctcctgtaaatttcaggtgaaacattgttagaaatgtaaattccggtgtaacttatgttttcaagaaagagtgaaaaccattcacttttttgaaaaagacgaggatttttttaacaaggagttatttggaaagtaaactgctttgtttttccaaaatacgaggatcacaggaaaaaaacatgacaaattgactcgtttttcgtcacgtttgaaatcaaattgaaatatttaatacccttaaaaacttttttcaaaaacgaattagtaagaaatttgtcacgggaagtcaagtctatttctagtggaaattgaaccttataataggaaacagataaaaactttaaaaaagagacacataaaatagatagaatcattcagggaggaaaatatgaaaaagcaacttgttacagcaacaacggcagtggttttggggacgactttgtttgcgggcgcggcgtctgcgcaaacgattaaggtaaaaaaaggcgatacattatggggactttcaaatcggtatggaacgtcaattaattccattaaatctgagaacaaattaaaatcggatatcatttacatcggtcagacgctttcgatcaacggtaaatcatcttcaggttcaaattcgggcagcaagtcatcatcgtctacatataaagtcgtaaaaggcgacagcctttggaaaattgcgaataaatataaaatgacggtaaaccaattaaaaagtttaaacggtttaaaaacggacctgatccgcatcggacaagtgcttaaagtaaaaggatcaacttccggttcagcgtcttcaggatcttcgtcatcaaagaagccttcatccagccataatattgcacagacgagcctgaatgtaaacaagctggtttctgatgcgcaatctttaatcggcacgccgtatgtatggggcggaacaacgacttccggctttgactgcagcggatttatctggtacctgttaaacaaacagacgagtgtcggcagaacaagcactgcgggatactggagctcaatgaagagcgtatccagcccgtcaagaggagacttcgtcttctttacaacatatcaagccggtccttcacacatgggtgtatacatcggaaacaacaagttcatccatgccggttctgacggcgtcacaacaagtgatctgaataacagctactggaaaccgcgctacctgggcgcgaaaagattctagcagtgagagaaacccgttcatccgaacgggttttttatttagacggggcagagctccatttgtttcacctaaaaatgaaaatgtgataaaaaatctaaaaaggttttctttttttcattttcatagagggcgatggcgtacgcgcccgcgctcggcatctgggcgaattcgcacggaatttcaatcatgctgcctgcggcgagttcggaccgtaccgctgacagcggcagaaatgagacgcccagcccctctttaataaatcgtttcgtaatatgcgtctgtgtcaccttcattgtcctgacgaaagggaactgtattctgacctggcggagcaaatcatcccaatagtcaggatggttatgggtcaaaagcagatattgtccgaacaggtctttcacttcatccgccttccctgtcccgggttttcggccgggtggcgcgacgaggacaacggggtcattgtacagggggaggcaagtgagggaagatgattgcacctttaagcagctcagtccgatatcggctgagccgtttctgatttgagaggcgatttcttccgattcgaaaatggtgaccgtcatttcggtttctttattgtcctctgtataacgcttcatgacagacgggagaacggtgtcggcgataagcggcgaaacagcgagtgtcagcgtgtgcgagtagccctggcgcaccctgtgcagctccgccatgctgttttcatagtcttccaaaagtctcatggcaaacggcacgtatgcttttccttcttccgtcaattgtattttccggccgctccgctgaaacagcttgcagctgatttctttctctaataattttatatgaacggtgacggtcggctgagataaaaaaagcgtttccgccgtttttctgaaattctcgtattttgccgcggtgacgaaggtgtgaagccatttaaaatccatagatgcactcctctgattaaaagttttaattaattcccttaaaaatattcattattttttaaatattatatttactataataacagaaagaggataagggggaatgaaattgatttatcgtggattgaaagggattacttgtgcagaaacggcgatcagccacattgacggagaaaaggggcatttaatatatcgcggctatgacgcgaaggatatcgcattgcaattcagttttgaagaagcggcgtatctcattttgaacggggcgcttcctgatgagcggcaattgcttgcgtttcaggaagaacttgcagccgagcgcgggcttccgaaacatttgatcggcttactggaaacgcttccggatgaaatggacgacatggcggtgctgagaacggctgtttcaggtttgggcacagattcatttacatatccgcccaagccggaagaagcgattaaactgattgccgtcacaccgacgattattgcgtacagataccgccgtaaacaagggcaggaagcgctgtcacccgaggcgcgatacggacacgttgaaaactatttgtatatgctgacaggcaggcagccgtccgcagcccaaaagaaagcgcttgagacgtatatgattctggcgatggaacacgggatgaatgcatcgactttttcagcgagagtcacggtttcgactgaatcggacttagtgtctgccgtcactgccgcactgggtacgatgaaagggccgctgcacggaggcgcgccttcaggcgtcacgaaaatgcttgaagacatcggggaaaaagaaaatgcagaagcgtatttgacagcgaagcttatgaggggagaacgcctgatgggcttcgggcacagggtgtacaaaacgaaagacccgcgggcggaagcgctgcgcataaaggctgaagaagtggcgggaaatgatccgtcgcttgacttggcgctttatgtggagaaggaagccatccgcttgttagagcaatataagcccggacggaagctgtatacgaatgtggagttttacgcagcggctgtgatgcaggccattgatgtcgacaatgatttatttacgccgaccttttcagcaagcagaatggcaggctggtgcgcacatgtgcttgaacagtccgctgacaacatgatttacagaccgtctgcgaaatacaccggcgcttttcccgaaacggctcagcagctttaattaccggcatatttgtccgtttaactccccgcactgcgtggtatcgtctcagtaataccaattgcaggagtgtgagaatatgaatccgatggacagacagacggaaggacaaaagccgcaggtgcaaaaccgccagcccggcattgagtcagacatggagccaaaaccgctcttggaggatccggatgtaaaagggtcgggcagattaaaaggaaaagtcgccgttattacgggcggagacagcggcatcggcgcagcggctgcgatcgcttacgcgaaggaaggggcggatcttgccatcctgtacctagacgaacatgccgatgccgagagaacgaaaaagcgtgcgagagaataccaggccgattgcctgttaattccgggagacgtcggtgatgaggcgcattgtcagaaggcggtccagcaagtcttagatcactacggaaaaatagatattctcgttaataatgcggctgagcagcatccgcaaaacgggattcttgatattacggctgaacagctggagaagacattccgtacaaacatgttttccatgtttcatatgacaaaagccgtgctgcctcatctcaaaagagggagcgccatcattaatacaacgtcgattaccgcttatcagggagacacatcattgatcgactattcgtgcacgaaaggcggcatcgtttcctttacgcgttcaatggcgatgtcattggccgatcaggggatcagagtaaatgcggtggcacccgggccgatctggaccgccctgattccggcaacgtttactgaagaaaaggtggaaaagcacggtctggacactccgatgggaagaccaggacagcctgcggaacacgcaggagcttatgtgcttctggcttcagacgaatcttcctatatgactgggcagaccattcacgtaaatggaggcaggtttatttcaacataataagcaagtcttatcccgcgcttttaaaaagggcgggatttttatttgattacatatgaatacgatttttaaaaaatagaagccgccagctgaattactaatgttaatatttaacagcggagaatccgctgagttctgttttatgaaaactgaaataatatatagaattttcaaaaaagttattttcatttttatatttttcgctataatatggtgtaggagaaaggaatgatgtgctgaaacatttcatgcgaaaaataagaatttagtcattattgctattgttgtctgaatattctaacatatattgatttacaaggagtgaagcagatgaaggggagcatattcagaaagaaaagcattcaggacctgcttgccgcaacgggcggggaaaagtcgctgaaaagagagttaggggcctttgatttgacacttctggggataggggccatcatcggaacgggaatttttgtattaaccggaacaggcgctgtcacggcggggccggggctgaccgtttcatttgtcatcgccgctcttgcgtgtttatttgcggctttgtcatatgccgaatttgcttcaagcgtcccggtttccggttccgtctacacgtttacttatgcgacactgggtgaacttctcgcatttatcatcggatgggatttaatcttggaatatatgctcgccgtcagcgcggtttcggtcggctggtccggctattttcaatcattcttggcgggcttcggcattcatcttccgaccgcattaacggccgcgccgggatccattaaaggcacggtcacattctttaatctccccgcatttgttatcgtgcttgcgattacattcctcctctacttaggcattaaggaatcgaagcgggtcaataatattatggtcattttgaaggttctggttgttctattgtttatcgccgttgcggccgtatatgtcaaacctcacaactggcagccgtttataccgatggggttcggcggtgttttcagtgccgcggcgctcgttttcttctcttttatcggttttgacgccgtctcttccgccgctgaagaaacgaaaaatccggcgaaggatctgccgaaaggaattatcttttcattaatcgtctgcaccgtgctgtatgtgaccgtatcggcgattatgacgggcgtcgttccgtttgcccgctttgaaggcgttgaccatcccgtgtctctcgtcctgcagatggccggacagaattgggtggccgggattattgatatcggtgcagtgttgggaatgacaacggtgatgctcgtcatgctgtacggccagacgagggtgatgtttgccatgtcccgtgacggtttggtgccgggggcgctttcaaaagtccatccgaagcataaaacgccgcacgtggtgacatgggtgttcggcatcctgtcggcattactcggctcgctcgtcccgcttgatgagctggcgaagctggtgaacatcggcacgcttgccgcgtttgtcctgatttcagtggcggttatcgtattgagaaagaaacagcctgatctgccgagagcttttaaatgtccgggggttccctttattccgatattgtccattctgttctgcgtatttttgattattaaccttggcgccaccaccatattccgtttctttatctggctgatcatcggtctggtgatttatttcttatattcgagaaagcattcgaaattaaacggggatttgtaaggagcggcacccgccgctcctttttatttttcggaataatgaaacatattgaaatgggcttaagttatcgcagtgaataagggataatatagggcggaagggaagtggaaagtcgtgtctgaccaaaaaagggttcaatgggcctcaaaaataggatttattatggccgctgccggttcggcgatcggcctgggagccatttggaagttcccttacgtagcgggtacgaacggaggaggcgctttttttcttgtattcgtcctctttaccgtgcttttaggctatccgcttttgctcggtgaatttattttcggaagacggagccagacaaatgcgattgatgcctacaaacaagccgcgccgaagtcggtatggcacctcacgggttatgtgggtgtggcggcctgttttttagttttgtctttttacagtgttgtcggcgggtggattttgctttatgtgttaaaagctgttacgggttctttatccgggctcactcaggagcagtacggaacggtgttcgggacggtcattgaaaatccgatccagactctcgccgcgcagcttgtatttatgatcttgacagtggcggtcgtcgcaaaaggcgtgcagaaagggattgaacgtgtcagtgcggtgctgatgccggttttattcgtgctgtttctattgctggtgctgcgatcagtcacgctcgatcatgccgttgaggggattagatttttattggttccgcactttgaagatttgacgccggaatccatcctatatgctttaggacaggcgttctttacattaacgctcggcgtttcggtcatggtgacatacagttcgtatctgccgaaaacccaaaaccttccgggatcggcgggttccattgttgtgatgaatgtgctcgtcacgctgtttgcgggactggccatttttccggcggttttttcgttcggatttaaaccggatgaagggcctacactgctgtttaccgtactgccggctgtgtttgaccggctgccgttcggctcgctgttttttatcagctttctggcggtctttttctttgccgcgctgacttcggccttttcgatggtggaaattatcgtagcgactgtcgggaaaggtgatgaaacgaaaaggaagaagctgtcgtggacaagcggtctgctcattttcttagtcggaattccgtcgtgtttatcatacggtgtgctcggtgatgttcatttgttcggaaaaacgttttttgatctagcggatttcacagtgagcaatgtgctgattccgctcggcgctttattaatatcaatcttcatcccgctgaaaataccgaagcgggagctgttcgccgagatgaaaagcggttccgccatcggctatcgtttctttcaggtgtggtatttccttctgaaatacctcgtgccgctggctatcatcgtcgtattgctgcatttaatcggcgttctttcattttaaaaaaacaggcccctgtaaaagggcctgtttttatgtttaaaaaccgaattgcagattcgtatcaacggcaacgatcgtatatacacaaacaatgacgaaaaggttgaggatgacaccgagcagtcccgggcccgtccgtccttttttaataaacagctcaatgatgccgaacggcacggcggccatcgcaaacggcagcatctgataagaatagaaagtcacattgctgatgattgccacgttcaaaagcagcagcgacaaaatcgcggtaccgactgatatccagccgaaaacattatgctctttaaaaattcttaccaattccataattccacctcaccgatgtttgctgcttttactgttttatttttcagcagacgttcgatttcttttgtcggccccgtcacgacagagccgtatacgttcattccgtgatgttcaacatagtcgattcggctgccaagattcatgtctttgcgtttcgatattgcatgcgcccattttttatggcgggacataaattcaagggcattgataaattgttcacggtctgtctgtccttgcgtttcgaaagaggacaccatcttggaatctttcccgggaaatcctaacggctcggcataaggactgtctttcagatttttctccgtttcgaccgcgttccataaaaacttcacatcgtattttttaaaagtagaatatacttgagaagaaggataggcccggtcataagaaagatagacctccgccacgcttccttcaggcaatttttttaatgtctgtccggctttgtcaatcgtgcgttcctttaagccggaaggatgggcaaaataatgctttgcctgtgccgcgtctagatcatagtagttaacggcaggcgatttgaccgtatctaaaaacatttcaatccgttctccgccgacggatttcgtttttgtgccgatctgcttttgcagcggaaactctgtattcatcccaaacagcttcacctggcttttcagtccggaggtatcgacgagtacgttcggcatggtggtcgccaccgtcacggctgcggtttccattaattgattgccggtgctttcttttcctcccaaaccgtaatagaggtagcttcccaaagtgcaaagcggcaaaatcatcaaggtggagatgacggcgagaactgaaatccgcaaatacgatttgcgttttccgtatgacaaaatggccttctgtttttccgggctgatgccgacgtcccattcccggtcgtcctgcatttcgctttcaatcaactcctgatagacttcaagcttttccagctcttcttcaaaggcggccatttcccggtcgctcatttctccatttttgtattggtaaaaacgctttttaaattcttcattcatcattaacacctctattataaagtgctttcagccgctgtctggcacgaaataaaacacttttaaaattagcctctgaaatattcataatatgggatgcttctttgtaattcagttcttttaaataatacagtgttaaggcctcccgataattgtcgggaagttcggacatataccctgtcagcacttccttgatttcaatctgatgagccgggctttgaacagccgtctgaaaaaggctcccaattaagtcatcggaaatggtcacttcctttttatgttttctgacataatctataaacgcatttctcgccacttgaaaaagccatggctttactttgctgtggtcgtaggagtgaatgtgtatgtatgccctcataaaggtttcctgcagcaaatcttcagcgagatgcttgtcttttgtcatggagagcaggaaccggtaaacatcattcatatacatttggtaaatttcatcgatcgtcactgccttttctcccctctatgttatacacgcataagaaaggtttaaagttgcacgttccatgcaaacggcttaaattcattttcacctcatcaaacaccatttctctatagtacccaaaatccgtcataaaagatagagatcggcggaggaaaaatatatttattagtaccaggtaataaaaaatattgttataatagagagagaacacttttgatcattacaacaaaggaagtgcgttatgtataagttttgtgcaaatgccatcaaattcattctttctctgcgcggaggagtcaaagtatacaataaagagaatcttccgtctgataaaggattcgttatcgcgtgcacgcatgcgggctgggtggacgtcctcacgctcggtgtcgggatattgccccatcagattcattatatggcgaaaaaagagctgtttcagaaaaagtggatcggaagttttttaaagaagattcacgcgtttccggttgatcgtgaaaatccgggtccgagcagcattaaaacgccgattaagcttctgaaggaagggaagattgtagggatttttccgagcggcacgagaacttctgaagacgtcccgctgaaaagaggggccgtgaccatcgcccaaatggggaaagcgccgctcgttccggccgcatataaagggccgtctacgggaaaagcgctgtttaaaaagggaaaaatgcggcttatcatcggcgagccgatttttttggaggacttttccgatcttgcgccgaaggagaggcttgcggccatgacagaagagctgaatgccagaattaaagagcttgagaaaaaacttgaacaactgtaaatgaaaaaaagcttgccgtctgtatcagacgcgcaagcttttttgttatgcttctttttgttcggcagtttccagcagttcatcaaacgccagttttttcacttcgatatatgcgacgtggtggccgtcaatttcattaatgataaattcgcagccttcttcgataatcgagtcgtattgttcgacgtcgtatttctgggtaaggaaccagccgccgatggtgtcgacctcgtcattttccaaatggatgccgaggagttcgttcacttgatcaatcaggaccttgccgtcaagcatgtaatggccgtcgccgagtttgcggatttcattgatttcatcgatatcaaattcatcacggatttccccgacgatttcttcaataatgtcttcaacggtgacaagccccgcggttccgccgtattcatccgacagaatcgccatatgaacccgttccttctgcatttttacaagcagatcgtgaatcggtgccgactcaatcacatggatgatcggattgacaaaatccgtaatcggcgagtcgactgatacttcgccgctgatgcaggcggtcagcacttctttaatgttaataacgccgataatattatctttgtcaccctcttcgacagggtaccgggtatatttttcaatctgaatgatatccatcatttcagaaattttgatatcatgcggcagactgacgatttccgtacgcggaatcatgatttcttttgcaagtctgtcgtcaaattcaaagattttgttcacatatttaaattcagactggttgatttcaccgcttttatagctttccgataaaatgatgcgcagctcttcttcagagtgggcaagctcattttcagacaccgtctccagaccgaacgtcttcgttaaaagacgggcggagttgttcagaagccagataaacgggaacatgatgcggtaaaaccaaatgagcggtttcgaaaacagcattgaaacggcttccgctttctggatggcgactgttttcggcgccaattctcccacgaccacgtgtaagaatgtaatgatcgcgtaggcgagaataaatgaaataatatgcgataatgagcttggtacgtttatctttgtgaaaagcgggtgaagcaagcgttcaatcgttgattcgcctaagacaccaagaccgatggaagtcaatgttatgccgagctggcacgccgataaatactcatctaaatgcgtggtcacttttttgacaccgattgcggctttatttccttctgctataagctggtcaacccgtgagcctctgattctgattatcgcaaactcagatgctacgaaaaatgccgtcagcgcgattaaaaccgcgactaaaatcaaattcacaatgtccaattagaaccttcactccttttgggaagatgaaggtaacacctcctgttagtaagataatggtttaacttaacagcagcataaatgattgaagcactgcaagcttttcaggagccagcctttttttcagctgggcgcgctcctctggttcaagcttttcaaaccgattcaagatcccggagatgttttgattcatgtgatcaatttccgatgccagatttccaacatcgtcaggcagggctgaagagggaaactggttctccagtcgatcttttatatcagacagggccaatcgctgctttttacaagcgactataaactttaaccgattaagtgcaagtgtatcgtagtaacgatagttcgaacaagacctgtcaggctttaaaagcccgaggtttgtgtagtaatccaccgtgcgtttcgttacaccggcaagctctgctaattcactgatgcgataagtctcagccccatctaaatccctccccaaccatcacgttatagttatgagaatagtttaatatatgaaggggagtttgcacaagtttattgttttccgtctttctcctgaaacggggcggcaggctgtctgaaaaagcgttgactgcgccatgtaaatctttcataatcattgtaaatagaaacggcagaaaaagacagaagggacagatgacagtggccggtttatcaagggaagtgacacagaacctggagaaaggttcatggatacgcaaactatttgatgaaggcgctcggctgaaaaaagagttcggcgccgataaggtgtttgacttttcaataggaaatccggttgcggagccgcctgaaacgtttaaaaaggcgctttgcgaagcggctgaaacagggcggcacggatacatacaaaaccaagggcttccggaggcgagagaaaaggttgcccgctttttgtcagagcggtttcagaccgagatttccgccaggcatacagttatgacggtcggagccggcggggcgctgaatgtcgcgctgaagagcattttaaacccggaggaagaagtcatccttctttcgccttattttgcggaatataaagcgtatgttgaaaattaccgcggcagacccgtcatctgcccgctgactgactcatttgagattgatattgaagcggttaaaggtgcgatcacaccccgtacgaaaggactgatcgttaatacgccgcataatccgacggggactgtgctcagccagaaaaaccttaacgaattaggcgccttattaaaagaagccgaagagcggaacggccaaagcatatttattttatttgatgaaccgtacagccagctgatctacggagaagagcaggcgaatccgtttcaggcgtatcaccgcgtgattttagtcagttcgttcagtaaagatctcggcattgcgggggaaaggctcgggtatatcgcggcggacgcccaaatgcctgagggcgatcttctgacggatgcgttcgttttctgcaaccggacgctcggctttgtgaacgctccggtcatgatgcagcgcgccgtggcgaaaatggatgatctttcgattgacgctgaaccttacagaaagcggagagaccttatggtggacatcctcacagaagccggcttcgaatttgaaatgccgaaaggaggctttttcgtctttccgaaatcaccgattgaagacgaggtggcgttctgtatgcatgccgcacagaaatacagactattgatcgtacccggcagcggatttggaaaaagcggctatttccgattatctttcagcgtgccttcggaacagatcagacagtcgcgcgatattttcaaagcactgtatcaagatttttcttcatagcttccaacacataaagatgggagaacggacaaatgtcgaggagaaataatggcacatcagacatcagcattacaggaatcggagtcttaaccgcggtcggacaaggcaaggaggcgtttctcgatgcgctcatggaggggcggcacgcctttgatgtgatgaaacgtcccggccggcagaaaggcagttcgtttatcggcgcggagcttagcgaattaacgccgccggacgcgctgtcgaagcgcttgtaccgaagggccgcattatcaggaaagacggcgcttatcgctttatatgaagcgtggcatgacgctcaattagacggcgctgatcacagccgcaccggtctgatcatcggcgggtcgaatatgacgcagcgcgaattgctgcaggcctttgagaaaaacggtgaaacgccgcaatttgtaaatccgacatacgggctttcttttatggatagtgatttgtcggggctttgcacggagcaattcgggataaaagggccggcctttacggtcggcggcgcgtcggcaagcggccaggcggcggttatccaggctgctcaaggaattaaaggaggcctgtttgaccggtgcatcgtgatcggggcgctggccgatctgtcgtacatggagtgtcacgctctccgttctttgggagcgatgggcactgatacatacgctgaacggcctgaagccgcctgccgcccgtttgaccggcatacggacgggtttatattcggagaggcgtgcggggcgattgtgctggagcgcgctgaatctgccgaagagaggggcgcacgatcgtgggccggcttaaagggctgggggatggcttccgatgcgaaccgcaacccgaatccttcagcagagggcgaaatgacggtgatccgccaggcgctggagcgggccggtctttcagcgaaagagatcgattacatcaacccgcacggcaccggttcgccgatcggagataagactgaatgccgggcgctttctgaaagcggcctgtcgcacgcgcggattaatgcgacaaaatcgattaccggacacggtctgagtgcggccggaacggtggaaatcattgctgttctcttgcaaatgcgggaaaacaagcttcatccgatccgaaacttaacggagccgattgacgattcatttcagtgggtgaccgacgggccgagcgcccataccgtacaccatgcgttaagcttaagcatgggattcgggggattaatacggcgctttgtttagaaaatcatttccgaagcagataacggcagccttctttttgaaggctgtttttatatgatgaaaaatctgaaaatgatgaaagaatggagttgtgatacaataaactatacaaatgacaatcatgctttgacttaggaggtggcaggatggggccctctgtgtagtcaatcacccatttcgttcctctcgcttaagaaaaaacgatgaaatcaggaggtgacgtccttatccttcaattcgggataaggtgaaatggacgatattgacagtttgattttaatcggtgtgctcattgcgttaacggcatttttcgtggcgagtgaatttgcgatcgtcagagtgaggagatccagaatcgatcagctcatctcagaaggaaacagacgggcggtgctcgcaaagcgtatcattacggatcttgatgagtatttatccgcctcgcagcttggcattacactcacatccatcgggctcggcgtactgggagagcctgcatttgagcggatgcttcatcctgtgtttcagggtatggggctgccggattctgccgagcatgtgattgcttttgctgcggcgtacgggctgattacgtttttacatgtcgtcgtcggtgagcttgcgcctaaaacggttgcgattcaaaaagcggaaaagctgacgttatggattgccggaccgcttcggttattttacgtgttcatgttcccgtttatttgggtgctgaacggctccgcgagaattctgaccggtttggccggattaaagccggcatctgagcatgaaggctcccactctgaagaagagctgcggatcctgctgtcagaaagtttaaaaaacggagaaatcaatccgtctgaatatacatttgtgaataaaatttttgattttgataatcggatcgccaaggaaatcatgatcccgagaaaagaaatcgcggctgtttccactgatatggacgtgccggaaatgcttgatatgatgctgaaagacaaatatacgcgctggcccgtaacggacggggacaaagacagtgtcatcggcatgatcaatacgaagcatctcttttcagatctgctgtttatgacagaagatgaaaaagcggaagtatccatcatgtcttacgtccgcccggtgattgaagtcatcgagacgatcccgatacacgacctgctgataaaaatgcagagagaacggattcatttggcgatattgtctgatgaatacggcggaacgtccggtcttgtgacgaccgaagacatacttgaagaaatcgtcggcgatatcagagacgaatttgatgaggacgaacagccgcagattcaaaagctgtccgaacgccattatgtgctggacggaaaggttcggatcgatcaggtgaatcatcttctcggcgcagagattgaagaggaagtcgacacgatcggcggtcttgtgctgaaacggaatattgacatttgtgcgggtgagtcgatacaaatcgggggatacactgccctcatattagaaatggacggccggtttattaaacagcttgaactcaaagaagaacagggccgcccgggcggtcaggggacaataaaccgcccgctgcccgtgccggaaacggtcatgcttcataacgcaaccttgagcgaaaaataagctcaaggtttttttaaatggatatcataacaaagccgcaccagaacgccaaaaggcttccggctgctgaaacagcgatgtagagcaggctttcctttatgcggttgttcatcatcagctgcacggcttcaatactgaaggtggaaaaggtcgtaaacgcaccgaaaaagcccgtcgcgatgatgacgccggcagaaggattatccagacccaagccggtgaatatgccgaggctgaaggagccgagcaggttgaccgcagccattccaagcggaatcggaaaaccttttgttctttctgaaattgtcttacccagcagagaccgtaataccgctccgatacccgccgcgataagcatcaggacaatcgtcatggcgtatcatgcccccttccggctgcgtgaagggcaatccgccgtcccaaaaaaatgccggcgtatgcaagagcaagaccagcgaataaagtcgcggcagcataacaaaaagccgctgcgggagacgattgcagcagaaaaatggtttcttttgcgaaggttgacatcgtcgtgaaacctccgcaaaaaccggttcctaaaaaggcggtcaaaagagggcgtttagcccgaatgatgaaataacccgtaataagaccgagtaaaaggcttcccgccgcgttttcgaggaaagtggcacccgggaaagttccgctgtgaatgtgcgcgctcatttcaaagcggagcaatgcgccaagcgcgcctccgataaaaattgcgatgtattgtttcatatcagccatccttagaaataatatccggaaaatcagttacaatgccgtcaactgccatcatttgcagcttttcggccgtcttgtgatttctgaccgtccaggcaaatactttcaggccgtgtttgtgagcggtggaaatcaagaaccgattcaggcgggtatatttaatattgacataatttgcggctgatttgtaagcggccagctggcttttggaaaacatcccgaagctgggtcttgcgataattgcagtcggaacggacggatacatgtcgtgaaaggtctgaatcgacttgagactgaatgattgaacgatagggtgaatggaaaaggtaaacctgcttaacagctggccgactgctttttcaagaccgacttgagaaacgtgccctttcagttcaattaaaaatccgatttcagaatgataacgcttcagaacctcttcgagcaggggaatccgctcccctttaaactcagccccataccagctgccggcgtccagagactgcagcttcttcagcgtaaaatcttttacaaaaccggagccgtccgtcgtccggtcgactttgtcatcatggatgacgacaatctggccgtcttttgtgagctggacgtcaagctcaatgaaatcagcgttcatttcggcagcgatatcaaatgccgcaaatgtattttcgggcgcgtaaccggatgcgccgcgatgagcgatggtatacaagcttgtcagctcccctcatgggcatttctgttattatatcagattcgtatatgcacagcgattcaaactggtgaatgtgcaaaacagtatttttttggaataaagatagtgcttttttcggtttacaatccgcagtgatgatttataatggcaaaaaggaggcgagatcatgggaaaagggagattgaaagtggaagaaagaattaaggccgaaaccgatgctgaaatccaaaaagcgactctcctgaaacagacacaatcaaagaagaaatagtgcctgaccctgttgtatctggctgaaagatgaacgaatgtgtgaaaaaccccggctgtgctctgaggccggggtttttcaggctgcctaaagacattaaaacaagctgatgtccgaatgttttagtataatagattttcgacaagacaaaggagcatatgccatgatgacacaatttcagagcttttttactcttgaccatattttgcagatcagtatcagcatcggaattttagcggcttttctcgttttgagaaaactgtttgtcaaatacttttttcagctcatttacaaattggcgaacaagccgaaaaccgacatattcaaacagattgccgtagcgtttgacaagccggccagatggtttttcgtggcgctgggtctgtttttggcgattgagtattcgccgtttttagacgggcagatggacattgtcaaaaaaatgtaccgctctttgatcatagcgctgatcgcctgggggctttgcaatctgacatcggcgtcttcgtttttatttcataaagtcaatcagcgctttgagcttgatatggatgacattttggcgccgtttttatccaaggtgctgcgctttgtcattctcgcgctcagcgtcagtgtgatcgcgcaggaattcaattatgatgtaaacgggttcgtggccggactcggacttggcggcttggccttcgcgcttgcggctaaagatacgatcagcaattttttcggcggcattatcatcattacggaaaagccgtttacgatcggcgactgggtcgagacgtcatctgtgacggggggcgttgaagatatcacattccgaagcacaaggttccgcacggcgcagggggcgcttgttaccgtacccaattcaacgctgtccatggaagccatcacaaactggacgaggatgacgaagcgccaggtcacgttttccgttcgtgtttcttatgcgacgccgattgatcgtttagagcggtgcatcacaaggctcagggaaatgcttcgtgaacatgaaggcgtgcatgatgatacgattatggttaactttgacgtgtttgcggacagctattacaatctgtttttcaacttttacacaaagaccatcgtctgggcggaaagcctggacgtgcggcaggatatcaaccgccggattattgatatttttgctgaggaaggcgtggagttcgcctatccgggccagaatgtattcgtaaaacagaagagccacgatgatccggttcatgtgaaggatcattccggagaaaaagaacgggcataacaggcgccgttcttttttcatgatatgataaaaagaaaaggcggtggaagagtggaagcgtttataacattgatcaatcaggctgaacgtatcctggtgctgacgggagcgggaatgagcacggaatccggcattcccgattttcgttcggcgggcggtatatggaccgaagacacctccagaatggaagcgatgagcagggaatactttgaacgccgtccgcgtgaattctggcctaaattcaaacagctctttcagatgaaaatgagcggaagctatgagccgaatgccggccatacgtatttggcggatcttgaaaagcggggaaagcaggtagacattttcacgcagaacattgacggactgcataagaaagcgggaagcagcagtgtctatgagcttcacggttcaattcagaccgccgcatgcccccgctgcggagcgcgctacgggctttctcatctgctgaaggacgaagtgccggaatgtacggccgaagtcggtgatcatgcggtatgcggcaccgtattaaagacggatgtcgtgctgttcggcgatctcgttcagcattttgaaaccctttatgaaaagcttgataaagctgatcttcttcttgtgatcggcacttcgcttgaagtggcgccggcaaggtttgtccctgaggatgcgggccggattcccggtttgaagcaagtgatcattaaccttgagccgacatattgcgaccatttatttgatcttgtcatccatgagaagatcggtgaatttgcaaaacggatcagcgccgcgacataaaaaaagccggatcctatacagatccggcttttcttattcatggacgggaatcatttgatccgtcagaacatcaaaggagtagccctgggctttcagtttttggatcaggctcggtaaagcgtgcaccgtcgcaggcagatcgtgcattaaaatgacatgcggcctgctcgtatgaacgctttccaaatatgcgagctgattcaatacttccggcacgtaccgcgcgtttttgtacttccagtcttcactgtctatcgtccagtcccagtacacgaatccgtctttttcgagattcttaatctgggcatccgtcaatgagggtttactgccgtaaggcgtgcggacaagatccgtttttactccagtgattgtctcgagcgtatcgcgtccctgctgcatttcgttcagcggtgatgtcggtgtttgataaaacaggtgattatcgtgcgtcacgccgtgcaggcccagcgcgatcccttcctgcttcgctctttgcacggaatgcttataggctttcatccgcggttcaagcataaaaaaagtggcctttgcgccatttgccttcaatacattcaacagctgttcagtatatggagacggcccgtcgtcgaaggttaaatataccgtttttttccctgggtcacgctctttctgcaaatgtttcattaagacgtcgggagaatcatttttcagccgcaggctttctgcttcatcccgaagctgcccgtttgcggtcacggtgacctgtttgttttttgcggcggaagcggaatatcccattatgacgattaccagaagcagtccgcacaaaactgctaaactcgtaagtttaaaagccaatgaaaacagagaaggggaagcaccttcttttgtgttgcgcataacaatctctccagtagcataagtttctgcataatgccgataacagcggaggcttgcgaagtgccataagttaacagcatatgtatgtcgaatcaagtatacaggaacaaaactggaaaagacatagaaaagatgtcgaataataagattttaagaaaaaaataaactccgcagccggctcgttcagtatgatagaatagttgacaataacagctgagaatgcacatcacggcagataacgattaggagggtttacatgaagacattagtaaacggccagttgattgatcgtgaagaagcggcagttgatattgaggaccgcggatatcaattcggtgacggtgtgtatgaggtcatcagagtgtataacggcgccttattcggtctgcgtgagcatatcgcccgtcttttcagaagcgccgcagaaatcggcatcaccctgccgttctccgcagaggacatagaatgggatctgcaaaagctcgtacaggaaaacaaactcattgacggcggggtctatatacagacgacgagagggaaggcgccgcggaagcaccagtatgacgaaggattggagccgcagacgacggcatacaccttttcagtgaaaaaaccggaaaatgaacaaaaagccggagcgcaggccatcacggcggaagacaaacgctggctgaggtgtgacattaagagtctgaatttactgtataatgtgatgataaaacaaaaagcctatgaagcaggcgcttatgaagccgtgctgataagggacggggcggtcacggaaggaacctcatccaatgtatacgccgtcataaacggcaccgtccggacgcatcctgcaaatgagctgattttaaacggcattacgcggatgaaactgttagagctgatgaaagaaaacgggattgaggtgcgggagaaggctcttaccgaagaggaactcagagatgcggatgaaattttcatctcgtcaaccacgtctgaattaatcccgatcgtaacccttgacggaaaaccggtcggaagcggatcgccgggacctgtagccaaaacgattcaggaggcttttcagtcgcacattcagcaggagctcggcgttcagtcataagctgaaaaaaaggccggaacacatccggcctttttgctccagtcagataaaaagagattcgatatgctgaacgagtacacgggagatcttctcttttgaaagacgatcaggttcaagcatggcatgcagcgccaatccgtcggcgatagcgtacattttctccgcttcggtttctttatcaagattcggtttcagaagcttattttcatccagccagtcaatcaggccgcggatatatgccaagatcccgtcctgctggggttgaaactcttctcccttatgtctggcataagctgtgaaagcgaaccacacctccatttcagccatcgtttcttcatctgtcgggataatttcaagcatcagacgcaccgctttttctttcggcggcagatctttcatggcaacttcgttaattctggcggccgctttttcttttacgagtgtcatcgcataccctaaaagctcatcctgggtggtgaaatagtgcctcagcgcgcctaaagaaagacccgcttcttgggcgatgtttctcactgtcgctccttccattccccgctccaaaatcgtccgccaagtggcttcggctatttgttttcttcttttttcatgatcgattattttaggcatggttccagtgtaacaggaaatattttttcttgcaattttgtaatacagttgtattaaataaaaagcagtgatacaatgcattttagaaaacgataagggggaaccggattgaacgcgattgcttggttgattgtcatttgtgaggctgctttttgggcggctgtcatcttcggattggcggcgcgctatatattcaggcggcaaaagctcggaatgttttttttcgctctcattcctatattggatgccgtactgtttctggcggccgcagctgatttatacagaggggcggcggcgactatggcgcatgcagtggcggccgtttatatcggagtgtctgtcgccttcggaaaaagcatgattcagtgggcggatgagcggttccgctattatgtggtaaaggaaggggcaaaaccggtcaagcggtacggactggattatgccaaacattatgcaaaaggatggggaagacatgtattagcatttgtcatcggcggcgttcttttagccggaacggtatttctcattcaggacgcttcccgcaccgaagcgctcagcggactgttaaagggctggtctgtcgtattgtgcatcgattttttgatcatggcgagtttttttgtaatgccgaaaaaaagaaaaaacagccgggagctgtaaaaaaagcagcttttgattaagctgctttacagaaagaattattttacgatcagcacgggaatatcggatttcgatgacagtttttcactgacgcttccgaataaaagttttttcagcctgttctggtcccggctccccatgacgatcaaatccgccgatatacggtcggcatgctcgataatggcatcagcgggatcaccttctaaaatgtcgatatccccgtcaatctggctgtcgttcatcagcattctcgcttccgcaacgatttcttccgtacggtcttcataaatcatcggatcaggggagattctttccgcctgaagcgggtcaggaacgcttgcaatcccgccgccgatatacgttgccccggctcccggcctcgggggatcaacaatcgtctgggtatcttttgcactgtgggaatgtacgaccgttaaatccgcgtggaacgtttttgaaaggtctatggctttttgaagcgcttttttactatcatcacttccgtcaaaagctgctatcaaccggtctgcgtgaaacatcagcctcatcctttcagtaaaaaaggtttgttttacaatacccgtgcggcagaaatgtaaaacccgcattgacaaaaaaaggatttatttatatgatgaaggaacaatataggaaaaaggaggtatggatcatgtcaaaactaaagcttgtcaactcatcttcagctgaataccggcgtgacttccatacagcttccgttttctgaacatttgcttaaaaacggggcagtcgcgcataaacggcgggtctgtaccttatttataataataagaggcatggagctgaggcttcatgtctttttttatacaaaaaaatgaaagaaagacaggtgtgatgcatgtggcggcattagcgaaaacaatgaaaaacaatccggaaaagcttgagggcggctgattgatgaaaggggatgacggtatttgtttactgtattaaaaaagctcgcgtggttttttaaagcctattggctgcgctatacgacagcgattgttctgttattgattgtgaatgtcattgagatgtttccgcctaaacttctcggtaatgcgatagacgatatgaaggcgggcgtgtttacgaaaagcgggatgctgttttacatatgtgtttttctcgcattaacggcagccgtctatttactgtcttatttttggatgtatcagcttttcggcggggcgaatgtcatggagaaaattctccggtcaaagctgatgggaaggcttcttcaaatgtcaccgccgttttacgagaaatacagaacgggcgatttaatggcgcgggggacaaatgacctgcaggccgtcagtatgacgacgggcttcggggtcttaacgctcgttgattcgacgatgtatatgctgacgatatttttgacaatggggcttctcatcagctggaagctgacatttgccgcgattattccgctgccgataatggcggctgcggtcagcctgtacggaaaaaagatccatgagcggtttacggaagcgcaggatgctttcggatcattaaatgacaaggtgctggagtcggtatccggcgtccgggtcatccgggcatttgtgcaggaaaaaaatgatgtcagccggttcggtgatatgacggcggatgtatatgagaaaaatatgaaggtggcgtttatcgattcactttttgaaccgactgtgaaacttctcgtcggcctcagctatctcataggtctcggctacggcgcttatctcgtttttcaaaaccggctgacgctgggagagctggtatcgtttaacgtgtacctcggaatgatgatctggccgatgtttgcgatcggagaattaatcaatatcatgcagcgcggcaatgcctccttggatcgtgtcaatgagacgctttcctatgagcctgacgtgatcgggcccaagcgccccgccggcatcaaggagcccgggcgtcttgtttttgaacaagtgactttcacgtatccgagcggagcgggaccggcggtttccgatgtatctttttccgtagaaaaagggcagacactcggcatcgtcgggaagacgggaagcggaaagacgacgatcattaagcagctgctgcgtgaatatccgcccggtgcgggagaggtcacgtttacaggcgtcccgattcaggagatcccgcttgaggagctccgcgggtggatcggctatgtgccgcaggatcatattttattttctaagactgtaaaggagaatctgctttacggacggcaggatgcaaacgaagaggaaatcggcggcgcgctgaaagatgcgcattttgaaaacgatatcggcatgctttccgacgggcttgagacgcttgtcggcgagaagggcgtagcgctctcgggcggacaaaagcagcgcatctcaattgcgagagcgcttttgaccgatcctgatattctcatattagatgattcgctttctgccgtagacgcgaaaacggaagccgccatcattgacagcatccgtaaaaaacggcggcataaaacaacgattatcaccacccaccggctctcggcagttgaacacgcagatctcattctcgtcatggacgaaggccgggtgtctgaaagaggcacgcaccgggagctattggcgcagaacggctggtatcgaaaacaatatgagaggcagcagctgtcctctcttgaagaaggggggacgggcgcatgaagaccgggagaagattatggaattacgcgcttcaatataagaagctgctgatatgggcggtcgtcctgctcattattgcggtcggcactgagctgaccggcccgtttatcggaaaaaaaatgattgatgaccacattctcggcattgaaaaaacatgggttaaagcctctgcggacgatccgggcgccgtcaggttccgggggcatgattatgtcagggaggaccggctcaaaccgggggcggataaaaccggagaggcgcacatttatcaagtcggtgcgggctactattttgttgaccgtcccgtcagttttgacggaaaccgttcggtgtctgacggccggctgacaatatcaaacggtaaagaaagcaggtcatatcccgtcattacgttatcaagacaggagatttttgaattttaccgtccggaaataaaaggattgctgacgttgaccgccatttatgcgggattgctcatgttttccgtatgttttcattacggtcagcattatctgctgcagatgggagcgaaccggatcatacagcgcatgaggcaggatgtattttcacacattcagaaaatgccgatccgctactttgataatctgcctgccggaaaagtcgtggcccgtattacgaatgacacagaagcggtgagggatttatatgtaacggtgctgtcgacatttatcacaagcggcgtttatatgctcggcatttttacggcgctgtttatgcttgacgtcaggctggccgccgtttgccttctgattattccgattttaatgatctggtcggttgtgtaccgcaaatatgcatccgtcttcaatcaaaaaatccgttccattaacagtgacatcaatgcgaaaatgaacgagtccattcaaggaatgccgattattcaggcgttccgccgcgagaaggaaacgatgaaggaatttgaagaattgaatgaagctcatttccgctacaaaaacaaaatgctgtccttaaattccctcatgtcccacagtcttgtcaatgtgttgcgcaatctggcgtttgtcgggctgatctggtatttcggaggcgcgagtctgagtgcggccggaattgtttcgatcggtgttttatatgcatttgttgattatttaaaccgtttgttccagccggttacggggattgtcaaccaattttcgaagcttgaattggcccgtgtctctgccgccagagtattcgagcttttacaggaggaggaaacggaagaagaaggcgctcccgcagacagaaaggcggaagggacagtggaattccgcgatgtttcttttggatatcgaaagggagaagaggtgctgaaacacatcagctttacagctgaaaaaggggagacggtcgccctcgtcggccatacggggtccggcaaaagctccatcctgaatcttctgttccgtttttatgatgcccaaaaaggggatatcctgctggacggtaaaagcatatacagcatgtcaaggcaggagctgaggtcgcatatgggcattgtgctgcaagacccgtatcttttctcgggcacgatcggctccaatgtgacactcgatgatcagcgtatttctctggagcaggcggaagaagcgcttcgccaagtcggcgccgcaagccttctgcaatctttgccgaagggcatcagagagcccgtcaccgaaaaaggcggcacactgtcctcaggccagcgtcagctgatttcttttgcaagagcgcttgtgttcgatccggccattttaattttggatgaggcgacggcgcacattgacaccgaaacagaagcggtcattcaaaaagcgctgcaagtggttcaagaagggcgcacgacatttattatcgcccatcggctttccacgatcagacacgcagaccagattctcgtgctggaaaagggccgcatcattgaaaagggaagccatgacgaattaatggcgcaaaaggggcagtaccatcaaatgtatgaattacagaaaggaacggcgaaatccgcggtgtaatcggaaagggtgaatcaaaagattcgcccttttttcattcagtaagccagtcctacccgttttctgacaaactgcgggctgatcagctcgcggtacagaaaatgtgccgtgtctccgactgtgatttcggcgccgtcttcaggaaggcgatcctgttcgaaccggtaaactccggcagcgtctccgtcaggaaggtaggtagggcagatgatcgtccagtcaagatcctctgccagcagcatctcgtatacgcgggcgtgttcctttgcggctcttgttgattttcgttttgattctgccgattcaaaacggtattgatcaggcataagccgtgattgaaggatacccgcggtgccgatcgtaatcagacgctgaacatgatgccgtttcatgccgtctattatatgggtcatagcggctgaaagggtatcgtcaccgtccgtgccgagacagctcacgactgtgtccgctttggaaatcaatcggctgacatcttcccgccgcctcgcattccctgttatgatctgtttttcaggaatgggaaggactgttccggctgatctgacaagagcgaatatttccatgtgtccatgtttctgcgcttcttttataaaagcctgtccgactcttcccgttgctccgagtaaagcgatgttcatgtaaaaaacctcctcgccgctcattatatcattcaaagcagcggggaaaagaatgcctgtgaataaacgggaaatggtgggcaacatattcattgaccaaagaaacacttacgaactgaaacagctcccaattgactgaggcaatgaatgacatgttttccctccttttttcctagggtatgtggaataggaaaaaagggtgacggcataaaagaagacgcggtatcccgcgccttctgtaagccatttattgagttattgtacgccttggccgcccatgttctgctgtgcgaaagatactaaacgtttcgtgatttctcctccgacagaaccgtttgcacgagaagttgtttctccgccaaggtttacgccgaactcagaagcaatttcgtatttcatttggtcgattgcttgagcagcgccgggtactaatagttggtttgaagagttgttgtttgccatttgtatgatctcctttattaagtagtatggttgggtttgctggaattgcaccagccgatgattttcggaatgaaaaccattgccagctcggcttcacccaatgctgtttgccgctttgtactacgtattatggtgaatcaaagggcatctcattcggaaaaccgggtggtaaatagcggaagggaaaagaaaagcccagcctgatgcggctgagcttttagctttcagtcatatatgtgataaagcattaattcgtgcagctcttttacgagagccggctcttcttttcccggatgtgtgtgtccccattcaatgtcaccggacttatggtaaaccccttcgtaatgcgtaccctgccagtaaaatgaaatccgccatccgggcagtttctcttttttgaataacggtttccagctgaagtgcgaaatcatgacgttcacgctccttgtaggaaatgttgatcttgttcattgtagctcatcattctgtgcctgtcccgggtaaaaccaaaaaaagacagcctcaccgccaaagtttttccggggcggtgatggaccgttctgataaataggacgcgtattcaaaatttctccgttttgtcaggtaatcgaccgatctcagcttcggatgggaaaaaatgctgcgcccggggcgggaattggcttcaaacatccaaactttccctgaatgatcgacgccgaggtcaaaaccgatttcgccgataaaaccttcaatgtgctcatttaacacgcggctgaccgccaaggcggctttggaaagtttccgcatcatgccgactctctctcgcggatcgccgtataattcagctaacgtcctgacttctccgccggttgccagatgcgtcgtgatgctgttttcaccggaaatttttgctgcaatggccgtcactgtccatttcccctcggcgtttttattcgtgtgcaccctgaaatcgacggggcgtccatccagccggatcaggtcaatgccttgctgaattaaaaatgcggacgggtcattgttttctttaaatgatttcatgaaggatgccgcatctgaatactctgccgtcaccaccgttttttcctcattcgtgtgtttgacagataagccggcatctgttttttccaccctgtaaatccccgttccgagtgcgccgtctgcaggtttgatatagacggtgtcaaatgtgttgcataacgtctctaacgcctctgcattcgggtgcaggacagattttggaagaagtgaagcggtgagactgtttttttccagaagcttatgaatgtcccatttattaaagaattgcggattaaaccacggaatctgatagtcattcatcagcctctgttttgtctgctgtaaaagcggaactccttccgtttttcggctcgggagcctgtcatatacgacattcggaagcgggacggacgtccgtttccagctgttttctttataaatcagcgcttggacggtgccttcttcccagttgatctgatgagctccgaaaacgaaacaatatccgttcgcctgttcatgaagtgagagcatcttggaaaagaaggctgtacggtctcttaacgggcgggacggcgatgatgtgaacccggctgtgaaaacgccgatcagcggtccgatgtgcaccgtctggccgtgtatgagaaagtcagcccggcttttatacggtatcaacagctcctcaaacaaatcttcagaaaggagcgcgcttttttcaagtgattgagaaaaggctacacggcatttgacaaccttggtcccgaaggcagcggataaaagcccttcccgtttcatggaggaggggagaaacagcgtatttttgctttttttatcgatgccgacaatcatccctttatgattcacgcggtaatactcccttcctgctgtcctgtgactgaagttcgcggaagcgtctcagcggacccgtatacaaatcctctttcgcctccggagccacgcttaaaatagctttccgtcccggctttgaattgacatccaaaagccagatgcgtccgtctttggcataacaaatatcgagccccagctcaaacagcggtccgaaccgttcatcaaggaaataaggaacggattgggtgatcgaaaagacatcatccaataaaacggcctgctgctttctcggaatttcctcaaaccatatgtcaaacttaatcggttctgatcctccgggcaaatgagataaaagaccgttctgataaccccttctgaccgcttttccgaccgtttcccaaacgcctgactccgttttgcgcatgaaaatgcggatgtcgcacggatgccgttctttatcctggatatttaagtaggattgaagcaaatagcggtgctgcagcacttttttgcaccaagacttaaaagacacgtgattggaaaatgattttgtttgtttgttttttccgatatagtaagtggcggtaattgattttttgcctgtttcaagcaggatgatgcctctgcctcccgcgccgaaagcgggcttaagtatacatgctttttccttggctaagtataattgcacctgttcatagcggctgacttcggccgtttcaggaatatagggactgatcagatgatgcttttggagcgcatctgtaaccgtccatttatcaggaagcccccgcccgataaattccgttttcggatattttttcagccattcgacgatcggtttggctttttgcgcttcagcggattttccgtaaaaacagcggtcgtaaatatattcgggaatatcgatttccgtttcgttccactttccgctttgcgggtgatagacgagcgctttcacgcgcaaagaatccggaaatatatcaaacggtgtaaagcgggctaagcgcacattatattgaggcgctctttcagccaattccccggcgtaatcttcttcgtgccggcgggatacagacataaaaccgagtgttgtcatattactactccccctttattcaaaaagccgctgatggaacggcccttccatccaataaatatgctaagcgcatcataaaagatgatctactgtaaagagtacgaaacagcatcttgccttattcctcacaaacaacaattcaggttcttcatttgcccgcatgcccgccagcctctataatacgaatagatatatcatcaagaaaatagaacataagatggaggcagaagaaaaggaatgggcatagcaggaacgtttctatttatgatcgtgatcggagccgcgatcggcgcggtgacgaatcatcttgccattcagatgttatttcgtccgtaccggccgtattacctgttcggaaaacgggttccgtttacgccggggctgatcccgaaaagacgggatgaattggcaaaacaaatggggctcatggtgacgaaccaccttttaaccccggaaggaataaaaaagcggcttttatcagataacgttaaaaaccaggcgcttcttttcgccgaacaattcacgcaaaaaatggccgcttccgaaatgacggtgcacgaagctttggccgccgcgggcatccggaatccgcaggaaaagacggatgcctggattgaccgttttaccgatgaaaagctttcggacctgtaccggaaatatgagcaccgcgccatcaaagactggcttcctgatgagctgcaggaaaagctggatgaaaaaatcccgctggccgcagattatatcctgaagcgtagcattgattattttgagagcgaagaagggaaagacagactcggaaatatgattgacgactttttgaattcccgggggatgctcggcggcatggtgcagatgttcctcggcaattcaagcttggcagaccgtgtgctgcctgagctgttaaagtttttgcgcaatgaggaaacgaaaaagcttctggctgatctgctttctcaagaatggggcaagctcaaatcttatacactttatgaggccgatgaaaagtggaatgcgaaagatctgctgttcagcatgaaaaagcgggctttggccgcacttcaaaccgcgccctttttcgaatgccggctcggtgacatcatctcccgttatgaaggggagattacggggacgtacgcgccgaagctgcttgatgcggcactcggcagtattgccgctcatttggaggatgtgctgaaacggctgcgtcttgaggaagtggtcaaagagcaggttgatcagtttcccgttgaacggctggaagaaatggtgctgtcgatttccaagagagaatttaagatgataacgtatttaggcggtctgctcggcgggataatcggagcaattcaggctttgtttgtcattcttttctaaggaaaacatacgccgatgatgaaagtcgctccgcagtctgttatagtggagtggtatgtccgaaaggaagaaaggagcggttactatggcagttcatttttatgatgcagcatatgatcttgaaaaagctttgcgaaacagtgatgaatacagccgtctgagagggctttatgatcaagtaaacgcagatgaatccgcaaaacgcatgtttgataacttccgcaatgtacagatgcagctgcagcagaaacagatgtcaggtgaagaaatcactcaggaagaggtagagcaggcacaaaaaacggttgctctcgtacagcagcatgaattgatttctcagctgatggaagcggaacagcgcatgagcatgctgatcggcgagttaaacaaaatcattatgaaacctcttgaagagctttacggcagcccgcaataagctccacacccctccatctatgaaatggaggggtttttttattcaacagaaaaatcaagcgaaccttttaccgttccgttaatgatgacagacagagtgtgaattccccgataatgcttgcgggtggttaaatctttaagggaatgacgtttgctgaaggcttttacgtttccgttatccatggcggactccgacatcttaaacaccttgcggctgcggtgcccccttttctttacaaaatcaatcgcgtattcaaccctgactttttgccgggcggctgagcggatctgaaaagaaaaatgtatgcttgttccgatggcggccgtttccgaattcagtgtaaaacgttccaatgaaatccgggaggcgtcttcaaacccgaaaatcgcaagcgcctgtttgtctcctctttttaacagtgtcctgcaggcgtgcttcaaaatccaatccgtgtgcggacagcttccgaaccgctcggctgcggtctgtgccagaagatccggatgggttttggagatgtcattcaggttattcgccacgctttttctgacatataacgagtcatcctgcatcaagcggtccagaacagggagaatcggagaaggatcttcaagaagagccggaatggagattccccacggcaggcgcggtcttgagccctcgctggcaagccttctgacatgttcgtccggatgctccgtccaggaaaggaactctttgaacatccgctcccggtcaagcctgatatacgggcggaccgcaaattcggaagtggaaaaacgagtgaaaaactgaagcgccttcattgattcttcccagtgatccgttccgtactgttggacataatcgggaaaaataatcccggcgagccctgtgaaatggggagctgtctcatataagacgtcaagcgcccgtatgtaatccttcggcagtgtttcatataaagagtctgtgatccggcgcatccgctgttttaacgtcagtccgggccaatcttcctgaaatatcagcgcccggcacttgtcccgctcaaaagccggatacgccgatttgactctgtgcagaagtgcttctgcaaattcttcgttataaatatcttttaatagagacatgacagtcaccgctttttttcttttattatatgcgaatatacgttccttttcaattttatcatacattcagcacagatagttcccctgatttttttagttaaaaaaacccttgttttttaacaatattattgagataataactctgaaagcgcctacacttacagatgatctaaggatacggtcgcctatactgcctggtatgttaaggggtagcaacagagagtaagtgaaacgagcgcatcaacggtcaaataaggggttcctgatatatttcgttaatagaaatgcacattggggagaaggcagcaaatcgatcgtatcccaacaaaacgacagttcaaagtctgcttgaggcaggcttttttgctgcggagaaaaggttgttctaaacaaagagacagggtcatatcctaatgacaagtacagtcatcaaggagggggacttctctgtgtcaaaacaaatgctggcgttaaatatagacggagcgcttcttcgctccaacggcaaacttcatcagacgacaaaggatgccatcgaatacgtcaagaaaaaagggatttacgtcacactggtcacaaaccgccattttcgctccgctcaaaaagtggcgaaaatattaaagctgaatgcaaaattgattacccacagcggcgcatacatttctgaaaaaatagatgagccgttttttgaaaagaaaatatcagaagatcacacgtttaatatcgttcaggtgctcgaaagctatcaatgcaatatccggcttcttcacgaaaaatattcgatcggtaacaagaagaaagtgaactccaatctggtcgggaaaacgatgattcatccgtctgacccgatcttttatccggtgcagtttgtcgaatcattaagtgacctgctccttgatgagccggtttcagcgcccgtcattgaagtgcatgctgaagatggcctgcaggctgatataacggatacgataatgaaagcattcccggccgtcgatgtgatccgcgtcaacggagaaaaactgaacatcgtgcctaaaggggtttcaaaagaaagcggactttcgatggtcgccgctgatctcgggctttcaatggaagaggttgtggctatcggccatcaggaagatgatctgccgatgatcgagctggccggtctcggcgtcgcgatggggaatgcttcaaatgaattaaaaagaaaagcggactgggtgacaaggtcaaatgatgaacagggagtggcttatatgattaaggaatatttccgcatgcagcaccgcaaaggctttctcgataagttccatatgaaacggccgtaatcaagagccgcagacgcgaaacgccggtctgcggctttttcgcggattgattttagcctgttctttctgtacactaaagaaagttttgaatctgaaaaataaggtgatcacattgcaaataaaaatagacggcataacggatgacaggctgcatcgtccgctgcaaaacatcgcgaatttattttttgaagagtgtgttcttacgtacggcgaaacggaggaaccctctgatctcgtcatctcacttgccatttctcaagatgcagacagcgtgtcggtatccggagaaatcaaaggaaccggcgaaaaggaacatcacacgaaaccgcttcttgccggatggagcgaaaaagaagtatttaaacaggtgaaaaacacgctgtcatatgtctacttaaatcttcttcaatcacatacgggcatgacacaaaaatggggaatcttaaccggcatcaggcctactaaacttcttcataaaaagctgcagagcggcctgacaaaagaagaggcgcatgccgatctgaaaaaagactatctgatccatgatgaaaaaatcaatctgatgcaggagattgtcgaccgccagctcgctgcggttcccgatctgtaccgggtcaaagatgaagtcagcatttatatcggcatcccgttctgcccgacgaagtgcgcctactgcacgtttccggcttatgccattcaaggacaggcgggaagagtcggctcctttttatgggggcttcactatgaaatgcagaaaatcggagaatggctgaagcggcatgatatcaaagtgacgaccatttatttcggcggcggcacgccgacaagcattaccgctgaagaaatggatcttttatatgaagaaatggtccgctctttcccggatgtcgcgaatatcagggagattaccgttgaagcgggccgtcccgacacgattacggaggaaaagcttgccgttttaaataagtataagattgacagaatcagcatcaacccgcaatcttatgaaaacgaaacgcttaaggctatcggcagacaccataccgttgaagaaaccatcgaaaaataccatctttcccgcaaacacggcatgaataatatcaacatggacctgatcatcggcctgccgggagaagggacggctgagttcaggcacagtcttgaagaaacggaaaagctgatgcctgaatctttgaccgttcatacgctttcttttaaacgggcgtcagaaatgacgagaaacaagcataagtataaagttgccgacagacaggaagtgtcccgcatgatggatgacgccgtccgctggacaaaagagcacggctatacgccgtactacttgtatcggcagaaaaatattctcggaaaccttgaaaatgtcggctactccttcccgggtcaggaaagcatctacaacattatgattatggaagaagtgcagacgattatcggtatcggctgcggggcggcaagcaaattcattcatccggaaaccggaaaaatcacgcacttcgccaatccgaaagacccgaaatcatataatgaccgattcgagcattatacagaagagaaaatcaaatacttagatgagatgttcgtcaaatctgcattataatatcaaaaacggcacggaatcagcgtgccgtttttttatgtttaaccgtctgtaaaaacgggaaaagatcatcagactgttattcgcaagaggtgcataatatgtatgatgtcataggagcgggaatcgggccgtttaatttagggcttgccgcattgttagaggatatacccggaacagacgctctttttttcgataaaaagaaagaatttgcgtggcatcccggtctattaattaaaggaacggatttacaggtggcgtttctggcggacctggtcacgctcgccgatccgaaaagccgctacacgtttttaaactttctccatgaacatgaccggctgtaccggttttatacgtttaatgaatttgatattccgagacgggaatttaacgactatttaagctgggcggcttcagaaatcaaatcatgccgtttcggctcagaggtaatcggcgtgaaaaatgccggcggacattatgaagtcagcgtcaagaacattgaggacggaagcatcagtgtctatcagacgaagcatttcgtcatggggacggggtctgaaccgcttattcccgcagagattgatgacggagcgcgtcaggacacgatggtcagcacggaatatttgttccggaaagacgagctcgccggcgccgaatcaattacagtggtcggctccggacagagcgccgcggagatcttttctgacttattgcatgatgaacaataccggcgcagccggctgcaatgggtgacacgctccgccggatttcgagaattggaaaccgccaagctcgggcaggaaatgtttacacctgattatgtggaatattttaaccgcctgccttttaaagaacggctgaacacactccctgagctggacggactgcgccacggcattgattctgacacacttgccaccatttacgacgccctgtatcacagatcgatcagcggaggttcgcctgacgtgtatattcagccgatggcggagcttgaaaaaattgaaaagcaaaacgggcgctgtgtactgagctttcatcaatggcagatggatgaaacttttacggccgattcagaaaaagtgatattggcgaccggctttaaacctcatattccggaatggtttacggcaatcgccccgatatcgaatgggaggatgagaaacggtttaaagtgacggccgattcccgtcttgtctttaaggacgacagacggcatcattttttcacattaacgaatcttgatcatgctcacggaacgggcgctacgaatttgaagctgtctgtttacagaaaccaaaaaatcatcaataccattctgggaaaagagcatttctccattaataaaaaaacggcttttcagcaatttcttcccgctcaaaaaaactgacctcttatgaagaggtcagtttttttttatgatttctgcggcttcttttcaggcgtcttccatttgaatacgctgttcagcaggagatatatccgcttcgattctttcgtgagcaaagggccgaagatggccagtatcaaaacatataaggcggcgaaaggtttaagtgaagcggacaggccgccggcgatgccgagatttgcgacgataatggagaattcgccgcgggacacaatggtcagcccgatattggacgatgctttatgagaaagccccgcccggcgcccggcgatcatgccggcgataaagtttccggcaatcgtcagcagaacggcgccgagggcgagccataccgcatctccgagtgaaaacggatcaatgctgaggccgaaactgaagaaaaacatggcgccgaaaaagtcacggaacggcacgacaagatgctcaatcctgtcagaatgggccgtctccgaaaacacgagcccgagcaagagcgcgccgatcgcttcagcgacatgaatcgtttcggaaaagccggcaatgaaaaagagcgcggcgaaaatgacgatgacaaatacctcgtttgaacggatatcaagcagcttgttcagcagaggcggcaatttccgggcggcaatgaaaaacagcagcatatatccgaaagcgatcacgattgacatcagcgcgcccccgacagacgtcgcgtctcccagaacaagcccggaaacgacggataagtaaaccgccagaaagatatcctcaaacataatgatgccgagaatcagctccgtttccggattggccgtgcgctttaagtcgacaagcacctttgcgacaatggcgctggatgatatcgtgatgacgcccgccaatacaagcacttccaaaaaggaaaagcccgtgataaatccgtagatcagccctaaactgaaattaatcagaatataaatcgttccgccggcggcgattgaacgtccggatttgactaattttccgactgagaattcaagcccgaggtaaaagaggaggaacaggacgcccatccgtccgaaaaattcaatcacttcccggctttcgataaacgtcagatcaatgatgcccgcctggggcgcgtgcggcccgacaagcattcctaaaatgatcaggaaggggatgatcgagaatttaattttattggcgatgacactcgcaatggccacaagaactaacgccgtaccgacttcaaatacgagatggtccataaacagatcacactccgtctctggagaggaagtcttggatcagttttttcagatgctttctttcacctgagaggacgagtgtatcgtttgcttcaaggagcgaatcagcccccgggtttaaaaactttttctggtcatgctttatgatggcgataaccgtcacgtcatagttttggcgcacatccagttcgccgagcgtccgccctgccgcttttgcccctttttcaactttaaaccattcgataatcagatcgctgaacgccatttcaatcgattcaagcgcctgcggtttgtacaccatcccgccgataatcgcggcaatctgtcttgcttccgcatcatcaagtgaaatgcttgccagaagctcatcagggtcgcggtcatcaaatctgtaaatttcccgcctgccgtcatcatgaatgatgatcgtcattttttcatgatttctcgtttcgatttcgaattttttcccgatgccgggcagatcgttttctttaatattcataaaaaatccctccggaatatactgtttttacaccgtaaatacagattggcaatgagaaatggtctgatgccggaggtaatttgactggtattgtatcggaatggcgcatgtcctttccattgtggaatcaatgaattgatcaagaggtttgacagataacagggagatcatccgggataacgcaccgtatccttttgacaggccttgcggagcggttttggtttgaaccggcgtctttgccgattccgtttcctgcgggtagaccgaaatttgtacatggctgtctgtttctgtcaccaattgggaaggaagagcgacatccgaaggggggaacagcaccataaaaaagctcagtaacaagctgagtatcacatatttcattatcggtgtttttcccccctttttgttttgtatatcaatttcactatataaaaatgtatgttcagtttcaaatgatatgcatttttcggtatctgttgaccttgaaaaataaaggagtttcgcttcgggggaaggaatatatcatttgaacaaaatatgtaagcggattcaaggagggagtaaacatgcagtatattcgttatgaagaaaagggaaagatcgcagagattgtgctgaaccgtcctgacagttacaacgcgctgaatgaacaaatgctccgggaattggaaaatgcatgcgttatggcagccgacagcgaagcgcttatcgtcctcttgcggggggaaggccggggattttccgcgggcggtgatatccagatgatgacgtcggatcatgattcgggagaatatgaacggctcatgaaaatgattgaatccattacgctgacgctctatgatatgaaaaaaattgtgatagccgccatccacggagccgcggcggggctcgggctgagtttcgcgctgtgcgccgatgtggtgctcgccgaagaaaacgcccgactcgcgatgaatttcatcggcatcggattggttcccgacggaggaggccattatttattaatgagacgcgtcggtgagatcgaagcgaaaaaactgatttggagcggtgaaaaattgccggctgaaaaagcggtgcggctcaagcttgccgacgggctgttcagcggcggccctgcggagggggcacaaccgtatatcgaccgattgctgcatgcgccgctgtcagcgatgattgaaacgaaggctatttatcagagcctccatatcagccggttaaaagacgttttatctcttgaacgaaaggcccaggaaaatatgagaaaaacggatgatcataaagagggcatccgcgcctttttagaaaaacggacgccgcaatttaaccggtaaaatacagaagccggaaagcttctgttatctgtggaataaaatcagctttccggcttcatttaccaagcggtgagtactgttctcaagctttttttcctctaacaaagcctctccggcggccttcgcctccgcctcattatctgcttcgatccgttcatccagcagcgtttctcccgacgcatggaatgcggtcaatacatattgtcccatcatgtcaccccctttatagaatgatattctgataaagaatttaaaatcctccattaatttttacccattattagtatataatgggtcaaggaaggagttggattcgtgcttacaattgaaaatgtaacgaaaacattcggcagctttaccgctgttgacaatttgaacctgcaaatacctgaaagggaaatgttcgggctgctcggcgcaaacggcgcgggaaaaacgacgacctttcggatgattttaggtcttttaagcctgactgacgggcatatcacctggaaagggaagccggtcaattattccatcagtgaaaaaatcggctatctcccggaagaacgggggctgtatccgaaagtgaaggtgagtgaccagcttgtctatctggcgagattaaaaggaatgagcaaaaaagaggcggaaaaagagctcatgacatggctcgaacgcttcggcattacagattacaagaataagaaagtcgaagagctgtcaaaaggaaaccagcagaaaatccagttcatttcggccgtcctgcataagcctgaactgctgattctcgatgaacctttcagcggtcttgatccggtgaatgtcgagctgctgaaagaagcggttatttctttgaaaaacagcggcgtttccatcgttttttcaagccaccgaatggagcatgtggaagaactttgcgagaatttgtgcattctccagaagggaaaacccgtcgttcaaggcaatctgaaagacattaagcggtctttcggcaaaaaaaatgtcaccgttcattcagatgatgacctcagctttttaaaaacgcatgaaggtgtcgtgaaatggaaggaaacaaatgacggaatcagactgcaggtcgcgaatgaaccggtttcgcaggatattttccgggcgctgcaagggaaaggttttatacggaagttcgaattggaagagccgtcactgcatgatatttttatagaaaaggtgggggccgtatatgaataaattttggattatgctgtttcatacatataaaaacaaaatcgcaacaaagtcattcattatttcgaccgccattaccgttttattagtattagcggtgaccaacctgcaatcgattatttccgtgtttcaatcggatgacggcaagcagcaaatcgcggtgattgatgaaacgggcgggctgtacccggcgtttgcaaaacagcttaaagcggcggatacagacaatgatctgcaggcaatggagacgaaggagtccgaaaaagatgccgtaaagcgtgtcaaagacggtgaatgggacggactgtttatcatcagacaggatcaaaaaggaacgataacgggagcatacaaggcgctgaccatttctgatgaatcagcgtataaactgctcaagcaggctttaacccagacgaaaaccgctgtcgaaaccgccaagctcggcatttcggcagaaaaagtcagcagcctctacactccgccggaagtcagcaaagacgcgctggaaaaaggggcgaaatctgaggaagagctcggtcaggtaatggggcttgtatacatcatgctgtttgtcatctacttctcagttatcatgtacgcaagcatgattgcgatggaagtggcgacggaaaaatcgtcccgcgtcatggaaattttaatttcaagcatgccgccgattcagcagatgtttgccaaactgttcggtatcgcgctcgtggggatcacacagtttgcggtgctgattgcagcgggttatctctcactgaagctgaaccctcaaaatgatgcgtcgtcgccgatcagtgcattcctcaattttacggatgttcccgtctcgacgatagtctatgccgtcattttctatttgctcggctattttctttacgcgacgcttgccgcgtttctcggcagtgttgtcagccggatagaggacgtacagcagacgattcagccgatggtttttttggtcgtggcaggttttatgatcgccatgttcggcatcggcaatcctgacgccggttttattaccgttacatcttacattccgtttttcacgccgatgattatgtttttacgcgtcgggatgctcgatatcccgttttggcaggctgcggccgggatcgccctgacactggtcactatcgtgatctttgcggcggtcggcgcgaaaatttacaaaggcggcgttttgatttacggaaacgccagcggattcaaagcgatcaaacaagcgctgcgcatctccaaaaaataaatgaaacagcccggaacagccgggctgtttttttattttacagaacgtgcattcgtataaaaacggtgctaaaataagggtaattcaatctgcagaaaggggagggcgagatggctgatctgacgtttattcatgccgctgacctgcatctggacagcccgttttacggcatttcgaatctgcctgaaccggtatatgcgcgtattaaagaaagcacatttcacagcgtccgccgtctgacggacggggcactccgggagcaggcagatttcgtgctgctttcgggggatctgtttgacgaagccaacagaagtttaaaagcccagctgtttttgagaaaacagtttacgagattacaggaagcgggtatccaagtgttcgtcatattcggcaaccatgatcatttgggcggtaagtggacgccgattgaatggccggaaaatgtacatatattcacctcgggtacaccggaggaaaaatctttctttaaaaacggagagcttgcggcaagcatatacggatgcagctatcaggaaagaagcgtaacggtcaatcaggcggcccgttaccggaaaatgaccggcgcgccttatcatatcggcatgctccacggcatgttatcaggagcggaagggcatgacccgtactgcccgtttacgaaagaagaccttgaaaaaagcggcatggattactgggcgctcggacacattcataaacggcaggttctgtccgcccagcatcccgccgctatttaccccgggaatattcaagcccggcatttaaaagaaaccgggcctaagggatattatctcgtccgggcggcaaacggtgagatgtcttgggaattcaaagaagcgcatgatgtgttatgggaggaaattgatcttgatatctcaggagctgaacatatgacttcacttctgaaagccgcatcggatacattctccggcttgcgcgcggcgggccgcccggcatgtgtcaggctggtgcttcgcggcgcggcgccccgcttttggacggaggcgcccgcaggcatcgcagaggagtttctttccgctttacaggaggaagaggccgaagaggaatgtttcgtctggccgcttgcgcttgaggatcggacggatgaaacagacagcgtgccgcccgatccgttttttaaagggctgcttcaggacatagaacaatgcgcggacatgagcggtgtatttgaagcccttgagcgtcatcccgtatatcggcgtcagatcacttcatttacagatgaagagatactggatattaagcggcaggctcaagccgttttaagacgccagatgaaggagcttcagcgatgaaaataacggcaatgcatatttaccaatacggaaaattttccgaccaaagttttcagctgtcagattctcccgtgcaagtgatctacggattaaatgaagcgggtaaaacaacattgatgtccttcatcaaaagcgtgctgttcggttttccgaaatcaaaaaaatacgaaccgaaaaacggcggggtttacggcggcactgtggaattgaagcatggcgatcacggtgccgtcaaaatcgaacggacaaaaggcgctgccgaaaaagtcagagtgtatacggcttcaggcgaaatcaaggacggagaatggctcaaacagcttctctccgatacagaccgggcgctgtacgaagcgatctattcgttcgatgtattcggactgcaggagattcaagcttttaaccgggacaaaatcggcgagtttctcctgtattcgagcttattcgggtcggaagcggcggcaaagcttgacgggcggctggcaaaagaacttgaaaggatgtataagccgaacgggcggaacccccgcttaaatcaggagttggatacattaaagcggctcagcgcccagctgaaacaggcggaagctgcggaagcgggctatcacagccttctggaagagaaaaaaagcgccggcggccgtttgcaggatgccgaagcacgattgaaagacataactgaagaaatcaaaacagtaaaatcggcgatagaagcaaagccgctcgcagacaaaaaaacagccttggaaagcgaactttcttcttatccggatgcattgaagcaattcccgaaggacgggatgcatcagcttgaaaaatacgaatcgcatctccatccgaaagctgcccgtcttgagggacttcgggcaaaagctgctgaactcaggcggcaggctgagctgctcgctccaaatgaggacttgctgcaaacagagcggcagctgcaggagctttccggcgagcagcatatgtacgaatcgcgcggtgaacagcttgccgccatccaatcacagatccggcagacatctgcccgcgttttgtcaggattgcagcagctcggaagacatgaggaagacggcattctttcactgaacaccgattatgaatatgaatggcggctgcaggaagccgtgcagagcgccggacaggcaagagaaagaaagacacagcttgatgcgattttcgaacaagcgcggctggagctggaagaagccgaacgaaaacatgccttgacgtcggaaaacattttggaccccgctgtcaggaaagaaaaagaagccgctttacaatcatataagcaaacggctgatacagaaggaaacgaatggcaggcacatgtacagcagctggaaaaacagcgcgccaaacaaaaaaagctctttctcggtgcgggcattctgttcattgcgattttcgctatgttaaaggaatggctgcccgccgccctttttaccggcgctctgctgctgtatatgctgtccggcatgcaaaaaccgctgccgtcagaaagaggaggggccggtcacaagaaaaagaagccgacgatctccaaagaagcggctgaccttctgcaggaagagctttggcgtgacggccggcaccggcagcagctgattgcggatcaagccgtgcttgaacagaaagaagcggcatatgaaagagtcatccgccaatatgaagaatgggaggcggaaatggcgccgtctgaaaaacaggcggaactttttatgaaggaactgggtttttcaggaagtccttcccatcttcttgacgcatatcatgtgatgaaagatgtcaaaaaagaaatccttaataagcatgagctgaccattgaagcgggccggctgcaaaagttgcaaagagcatttgaggaccgggtcaaaaagctgagtccttcagacggaagggagctgtccgtaaaagaaagactgcgcgttttgctggtacaggcggaacgggcccgtgaggaagcaaaacgaaagcaggcgctcgaaacggatctgctgcatgcacaagagcaaatgcgtgaattaaacgaagaagtccattactacgaacagcaggtcaaacagcttttcatggcggcaggcgcaaaaaatcgcgaacacttttgtgaactcgccagactgaatgaaagccgccgggaaacagagcggcagctgcgcgaaatcaaaacgcacttgtccggcataggcggaaaacagcttgagccgtatatgagccgcacagtgtccgaacttgaacatacagtcgttcagaaggaaacagagaaaaaaacgcttgaggaaaaaagcgcgcagctccgtgagaaaaccgctttattaacggtgaaacaagagcagctggagtcctcggggcttgtatccgatttaaaacagcagacagaaatgcagaaggagcgcgtgaaaaaaaccgctaaagagtgggccgcattacagacggtcagacacatcatcagggaaaaaatggagcggcataaaaaagtgacgcttccccgtctgttagaaaccgccggtgcattatacggaccgcttacggacggacgttaccataaattgtatttctccgaggcggatgattccattatggtcatgcggaaagacggaactgtgttttcagcaggcgaactgtcacaggcggcatgcgagcagctttatgcggcgatccgttttgcccttgcgtcagagagggaatctgcggtatcacttccgtttttacttgatgacagttttgtccattttgacaggcagcggctggagcggctgtttgatgtgctgaatcagctttcagaaggcgggcggcagatactttatttcacctgccatgagcatgtcagccggtcttttcacagcggacaagtcatgcggctcctgtcataaaagagtttattttcaaaaaagaggtatgtgctatactggtattatgtaagatatggagggagcttttaatagaatggcaaaaggtattatgctgcacgaggtcggcgagcaggtcgatcaatactttctgattaaatcttcgactaagggaatcgcaagcaacggaaaaccattcctgacgttaatgctgcaggaccaatcgggagatatcgaagcgaagctgtgggatgccaagccgactgatgaagtaacgtacgcggcgcagacgatcgtgaaggtgatcggagatgtccatcactatcgcggacgaaaccagcttaagctgagaaacatccggccggccggcgagaacgaaaatgtcagcattgatgattttctggaaacggcgccgattccgaaaaatgaaatgatggaaaccgtcactcaatacatttttgaaatgaaaaatccaaatatccagcggatcacaagacatctggtcaaaaaatatgcggctgagtttatggattacccggcggcggctaaaaaccaccatgagttcgtctccgggctcgcgtatcatgtagtgtccatgctgaacctggcaaaagcgattgccgatctgtatccgtctcttgaccgggatttactgtatgccggagtcattctgcatgatctcggcaaagtaaaagagctttcaggccccgtctccacgacgtacaccgtggaagggaatctgctcgggcacatttcgatcatggtgacagagctttcaaaagcagccgaagagcttcagattgacgctgaagaagtgctgattctgaagcatttgattttaagccatcacggaaaagcggaatggggaagcccgaaaccgccgatggtgaaagaagcggaaattctgcactacattgacaatctggatgcaaaaatgatcatgatggacagagcgctggaacgggtgaagccgggcgaatacacagagcgtgtatttgcgctggaaaaccgttctttctacaaaccgacgttccatcaataagataaaaaggccgattctctatgatcggtcttttttacgttcagctctcataacttgtctttatcaagcatagcttagaataaagactctgggtgaaaaagggaggaaaccgacgtgctattttttccttggtgggtatacctttgcattatcggaattattttcagcgcctataagcttttcacaacagctaaagaagaggaaaagcttgaccagtcgtttattgaaaaagaaggaagggtgtatattgaacggatggaacaggaacgcgagcgccgtatggcggcgcccgcaagtgaaaacacggatgcagaagaaaactccaatcattccatcgcataaaaaaactgtgcggggctcgctgagagcccgcacagttttttttatttagattcagaagaagttgaagtgttaaacgtgtcttttaagtctttgtcttccacttttacgtcagcttttttcatgactttttgaattgccgcctgtacagctgagttgtcgtttaatttctgtttaagaacttcttctttcaactcttttttcatgtcatcatatttgccgcgttcctctgtctttttgatgatatgataaccgaattttgttttgaccggatcgctgacttgtccgactttcagaccgaatgcagctttgctgaatgtttcatccattgactttttatcgaaccagccaaggtcgccgccgttgtcttttgagttgtcagttgaatattctttcgcaagcgtttcaaacttctcgccttttttcagttttttctccacttcgtcagctgtctttttgtcagcgacaagaatgtggctcgcccggattttaccttttaagccgtcgtaatattctttcgtatcagcgtcagtcactttgatgttgtctttcgccgctttttgtgcaagcagttcgtacttcacctgatctttcaggtaatcttcgccgtactgctgtttaagggcgctgtactgatcgccgagctgcgttttgtactctttcagcttgttatcgatttctttatccgatactttgtatttttttgctaatactttttcttgtacgagctgtgtcagcacacttgcgcccgcggtttttttcatattcgtgtagagttcgccttttgttacatttccggcatccgtcttggcaatcacgtcgttgtcgccgctgctgcaagcgctgagagccaggacgctcgttgccgtaatagctgctatcgcgattttcttcattcctttaaacactcctaatcatccaaattaaattgcatatgcgtatcataacatattgtggctttctgtaaaaagattttaaataaagggcattcgtctagtcaaactttttcctgatacatacaaatatattgatcatgaaaaggaggtaatgaaccatgggcggaggatattcaaacggtttcgcactgctcgtagtactgttcatattgcttatcatcgtaggtgcagcttacatttgttaagcgaaacggatcgctttttctaaaagcgatccgttttcttacccgggcgcctaatcgtttcagaagtaaattgcatatgatgtaattggaaaaataaaacgttttgtaggaggtgcttttggagatgggtgaagtatttgcaggcggttttgcattattggttgttctgttcatcttattgatcatcatcggcgcttcttggctttattaagaaaaaaatatggctgtcgggggtcagacctccgtcagccatatttttttgcctgtttacacagtaaaggagatctcgacgaatgaagagatcagtaaaattaaaatagatacattaataaaacggaataccttatcctgccggtcttcaggaatctctctgacaaggcataatgtatttgtgagcctgtttataaaataaagaataaacagggcagccacgataaaatagaataaaatgatgggagattccccctctctctgaactgctcccatattacattaccaaatatttattaaaaaagatagaatgtaacctgaaaaatcagcgggatatcaagactccggcactttttttactaaaatatcaaaaccgtcggattcctggtcaatcagacatgatttgggcgctttgaccaggtgcagcgcaaacagaagatcaggcaggcaataacccgcatgaatgctcgaaatcatataaaagtaatgagcgtgtctcggaaatgccagtccggcataaaacaatagcggcgtaatgaataaaaacgggctgatcgtagaaatcagcatcgtcgttttcggtatgcctttccatgtcggcatccgcaagaagtacattttcatttccttttttctttttttacagatcatcggcaggacatgtatgactttatgtacaaataaagtaacaacgagcagaacacaaaaagcaaacacgtgcccgtcacttaaactgatattcggacgcagcagcccgaatgccaagaagttgcatataaaaaacaggatcataaaacctacagcagtcaataataaacgaaccgcaccataatctttgatcagattaatggttttccagcaattcatcagagtcatccttccgtacaaagatggaatacaatctcaaaataatttactctcttcaggagaaaaaatcaatccttttttaaagaaaaaaaataaccccggaaagggaagaacagaagagctcggtgaaacatggaaatgtacggtttaacctttcttctccattcattatcagctaaaataagattaaagatagaaagaagtgaaacggatggattcaatggatcagcgtatcgggcgtttagaatattacatacaattgctggtgaaaacggtggatatggataagtaccctttttatgcgatgatgattgaaaaagggctgaccgaagaagaaggagaagaggtcgggcggatctgccgcgaattggaggacgagctggagtcgcaaaaagcgcaaggctttgtgacgtttgacaagctccttgcgctttttgcgggacagctgaacgaaaaattagatgttcatgaaacgatttttgctctgtatgagcaggggctttatacagcgctgatggaagaatttattgagataatgaagcactttgattaactgttgatcggttccagctcttcagccgtttcatggacagccgattcgtctgtttttttcttcagccttccgtcttcactatcaaaatcattgtttatgtttgtcaatgatttctcgaatatctccataaaatcttcgccgtaaatgtggcggatgacacaggttaattcttcaacttccggaaacttcccgaataagtggtagatcggctgtgagcctttaaacaccgcgtttctagacgggtcaaactcctcaagcaggctttcgaatacattttccccttcttctgttaactgaatgtacgtgttccgtttatcattcagccgcttggaaaatttcagatatccccgttcttcaagcttttttgaaaagttaaatgcagttgatacgtgcataacgccgaatttggcgatttctgaaatagaagctcctttaagctgataggcaatccataatatatgatgctcattaatattaaggtcgtacggcttcagccaattctgccagtctttctcgatagatttccagagtgctttggacagctgcgccattttttgggtatagattaaagcttcttttagatcgtaaggcggttcaacacgattcaatacagatcacctgcttcacattttcttttcctctattatgccaataaaataaagattaataaagatgaaaatttaagaattttataataaattcttaatccgttgctgtgaaaggctttaaaccgcaaaaaaaagtgcggaacgcaatatgcccgcactttttttggttgtataggatattagttttgtaaggttttctccagctgtctgattttctcttcaatatcagcgatttccttttgaagatcctgctggtgcggcttgatttcctcctgccaccttttaatgctggtctgaagctctccgcctacgtctttaatgacttctgcgctttctttcgccgtttggacaagctggtctttaagcgccattccgtctttttttaaccgtttgattgtgtcctcaattgaattgcaattcgctttgattttgccccgcagctcttttccggatgaaggagccgaaagtaacaccgctgcgcctccgatcaatccgcctacgaaaaggcctgttaaaagggaacgtccgtcagccatttaaaatcaccccgttttttttctcataacttttatcatttttgttcagaagaataaacttctatacatagcttgctttattttagcatattttttaagggaaaaggagggagaaggttgtctgtctttatgattgttttatcttgtatggctcttgtctttgcggcgggcgccgtttattacctgaaactgctcggccaggccgcttcttatccgccgaagcgggtcgtccgccaaaaggccatcgtctgctcagcaggaaccgccctcgcattgttccttatctttttcacaaaacttctcgtataaaacatgctgaaacacattaaaaaacctcttccggccggaagaggtttcggtatgcggttatttcaccgtttcaatcatattggaccgttttaagatcgtctgcacaatcggatgcataatgataatggcgatcgcattcagcgcagccgccggaaggacgaccgcgagcaccaaggcggtgaatccccccggcaggccgacaatcagaagggccagcgccagaaagagcaaaccggagatgaaggtgccggctattgtaatgacggcggcggccgctgttttcacgctctttttcaccaaaagcgccagcgcgagaaacagaaacgccgttaccggtttttcaatgatattcggaagctgtccgcccggaaaagatgtcgtgagtgcggaaatgattcccgttacaatcccgatcatcagcacgttctgcacacggggaaataacagaatacccataaacatcatcacaagcatcatatcgggtttcattccgaataataccggcggcataatggaatgaagcaccgctccgattgccgcaaacagggccataatgactaattcttttgttttcatactaagctctcctctgctaagctttttcgccatccaataatatgctcgtcatttattgcgatggccggaaaaattgatatgcaaacagtatatcaaaggaaccgttatgttagaagaaatttattcgttttcctgctggaactttttcataaactgagccagtttttcacaatcagccaggctgacggcgttgtagatagacgccctgcatcctccgactgagcggtggcctccgagtccggtcattttagccgctttcgcttcttcaacgaattttttcgtgagactgctgtcgcggagggtgaacgtgacgttcatgtgagaacggctgtcttttgcggcatgccccgcgtaaaaaccgccgcttgcgtcgattgtgccgtacaggacgtcggccttttcatgattgcgccgttcagccgcttcgacacctccgttttcagccagccattcaaggacgaggctcagcatataaatcgcaaatgtaggcggcgtattatacagtgaatcggcttttgtatgagtggagtatttcaaaattttagggacgttggcgttttcgttttcaagccatgattttttcatgatgacgaccgtgacgccggacggaccgaggtttttctgggcgccgccatagatgacatcaaacgttttgacatcaatttttctgctcaggatgtcgcttgacatgtcggctacgagcgggattggtgaattcgggaactctttccactgcgttccgaaaatcgtgttattggacgtaagatgcaggtaggcgccgtctttgattcctgtgaggtccgcttccggtatatggttgtggtttgaatctgcgcttgttgccgtgacggatgtgtttccgaacagtttcgcctcggcgagtgctttttcagaccatgcgcccgttacgatgaagtgagccgtttgctccggcgttaaaaagttcatcggcagcatggagaattgaaggcttgcgccgccttgaagaaataaaatatcataatcgtcgggaatatccatcagttctttcagaaggctttttgctttttgatgcaccgcatcatattctttgcttcggtgggacagctccatgacggacatgccggtgtcattgaagttgacaaattctttctgtgctttttgcagcacatccagtggaagggctgcgggtcctgcattgaaattcgttgtacgttccatgtttacgatctctccctgttttccgctttagtgtaagaaataatacaattatcctatcacaattttttgatttttttgatatgaaaaaatataattttatgttttttgtgttgccggacgcaaaaaaacctcatctttaagatgaggcaagccgttttctgacggttgaagcgatctcctgaagatcgtcaggcgtatagtcttcggcgtgggtcttccagacagccccgaaaccgtcgccttttccgtaacgcggaatgatatgcatgtgaaaatggaacaccgattggcccgctttttcaccgttattattgagaatattcagcccgatcggctcgaattcatcgcggatggcgcgtgcgactttcggcaccgcttcgaaatattctttagaaagctcaggcgtaaactcgtacacgttttcgatatgtgttttcggaatcacgagcgtatggccttttgtgacttggctgatatcaagaaacgccacaacatgttcattttcgtatacttttgaagacggaatgtcaccggcaatgattttgcagaaaatacaatcgtccgctttgtgcatagatgggtttcctccctgaaaagaaatatatgtatattctcatcgtaccacaaaaacggtcaaaacaaaaaacaggatgaacggctgcgcgttcaccctgatgcagaagtacgagctttatcacagaaaattaaatatgccttttgtaagcacctcatttgtttttaaaatgaagacttatgggtctgcttaatcattcctgggacaaacacctcatttgattatttcatcatgaatgaagaacatcatcaaagcagtgtgtgaagaaattgtaagcacaggacatgttgattttcatccaactgttctaagacgtcttttataaacacctcattttcagttgattaaagctgtttccttctacatacattatgatgtccgccaaaacgataactatgcacgcttttcacgtgagaaaaaaagggaatcgtttcaaatcagactttatttttggtactatgaagaaaaacgaatcagaaggggagaaattatgtctctgctatcggtaaaagacttaaccggcggttatacgagaaacccggtcttaaaaaatgtttcattcacccttgagccgaaccagattgtcggactcatcggattaaacggcgcgggcaaaagcacgacgatccggcatattatcggattaatggacccgcataaaggctcgatcgagctgaacggcaagacgttttcggaggataaggaaagctaccgctcgcaatttacgtacatccccgaaacgccggtgctgtatgaagaactgacgctcaaagagcatctggagctgacggccatggcgtacggcctttccaaagaaacgcttgaaaaaaggcttcctccgcttttgaaagaattcagaatggaaaaaaggctgaaatggtttcccgctcacttttccaaagggatgaagcagaaggtcatgatcatgtgcgcgtttctcgcggagccctcgctttatatcattgacgagccgtttctcggccttgacccgcttgcgatcaatgcattgctggagcggatggacgccgcgaaaaaagccggatcaagcgtgctgatgtcaacgcatatcctggctacggcagagcgctactgtgacgcattcattattttacataacggcgaagtgcgggcaagcggcacactggaagaactgagagagcagttcggcatgaaagacgcagctcttgatgacttgtatattgaactgacgaaggaagacgccggccatgaataatatgtctactatttggcagtcccggcttgaagagcatataaaggaaaccagaatgtatatgaaatatatgctcaatgatcatctcgtcattgtgctgatcttttttattgccggcgcggcgagctggtacagcaagtgggtcaaagacatccccgttcattttccctctttttgggtgatggcggtgctcttttcatttgtgctgaccggttcatacgtccggacgctgttaaaggaagcggacctcgtgtttctgctgccgcttgaaccgaaaatggggacatactttaagcattcatttaagtacagctatctgtcacagctgtttccgcttattgctctgtctcttgtatgcatgcctctgtttttcgctgtaagtccgggggcgtcgcttgcgtcgtatgccgccgtatttattcagatgctggcggtaaaagcgtggaatcaggccatggagtggcggatgacgtttatgaatgacagaagcatgaaaatgatggatgcggtcatacgctttatctgcaatatgctgcttttatacttcgtcttacagtcgttttatgtgtacgctgccgccgtctacattgtgatggccggcctttatgtgtatttcacatcagccgcaaaacataaatcattaaaatgggaagctcatattgaatatgaattaagaaggaagcagcggttttacagaatcgccaatctgtttaccgatgtgcctcacctgaaaaaacaggcaaaacgccgggcgtatctcgactttttgctcagaatgattccgtttgagcagcggaaaacgttctcctatatgtatgcgcgggcctttctgcgttcaaatgattatctcggcattcaggtcaggctcacgattatttttatcctgattattatgctcgtttccgccaatccgtggatcacggcggcgttaaccgtatttaccgtctttattacgggaatacagcttcttccgctgttcgggcattttcatcatctttctctgcaggagctttacccggtcaatcagaaagcgaagctgcaaagtttcttttcgctgatgaaatcgtcattaaccgtgcaggcgctgctgttctgcgcagcgtcagcctatgccgcgggagtcagcggggtgctgtatgcggccgttgcttcagccgttctgatttttgtgatcatgccatcgtatatgggcggaagattgaaaaagtacggcaagctgtaatcaatcgggtttttgaaacctcaatgaaagaaggagacacagatgaccgacgatcagcagctggtacaggaagcactgcaatggaaagcgcgttttttgcgcaaagattccatgcttgaacgcttttctaaaggaatgcaggcgaaaataaatgagcggattcccgaaaaaattcatgccgtcatcacagaaagcattaaaaaaatgaccgaagcaacaatggcgggttcaaatctggtgaaaagcaagcgggatacaaacggtatgacgcttgctgaaaaagatgctctcgccagacaaaccatcgcatcgtaccaaaaggtcgcggcagctgaaggtatcggtacgggggccggcggaatttttttaggaatggctgattttcctttgctgctatccattaaaatgaaatgtctgttcgatcttgcctccatttacggctatgatgtgaaagacagggatgagcgattgtttttgctgtttatttttcagctggctttctcaagcggtgaacagcggaaacgcatatactcaatgattgaacagtgggattcgaaaaagcatgatgtcgattggagagtttttcagcaggaataccgcgattatctggacgtggtcaaattgtttcagcttttgccggtcgtcggagccgccgtgggcggagcggccaattataaactgctgtcacagctcggtgagacggcaaggcacgtttttcatttaagaattacaacagccggtacgtaatgtaccggctgttttttttatgtcagcgggggtagcttaccgcggcgccgataagcaccttggcggccgtcagcatcgctttttcattaaaatcaaatttcgggtggtgatgaggataaacggtttccgcattttctaaagcggcgcccgtaaagaaaaaagcgccttttgtatgctgcagataataggaaaaatcctctcccgccatctgcggctctccttcaacgactttcgtaacgccgtctgtttccgctgcggctgccgccgcgtgcgccgcttcctcaggatgattgacgacggcgggatagccgcgtttgaaacgatattcataggaagcggagtgcatggaacagattccttttacgacggcttctatttctgcttcgagcaggccgcgcacactttcgtcaaacgagcggacggtgcctgaaatgactgcctgatcggcaatcgcattaaacggattttcagcggtgaacgagcctgctgagatgacggccggctgcaccggatttacccgccggctgacgatatgctgaagagccgtgacgatttgtgagccgattaaaacggcgtccttcgtatcgtgagggatcgcaccgtgaccgcctttgccgatgactttaatcgtaaagccgtcagcggcggccattactgggcccgggcggcataagaccgttccgacgggttcagtcgcccataggtgtgtgccgaaaatggcatcgacatgttcgaggcagccgtcctcaatcattgcttttgctccgccgggagataattcctcagcgtgctggtggatcatcacaaatgaccctttcagtttttcccggttgcggtacagcacttttccggccgcgagcagagccgccgtatggccgtcatgcccgcaggcgtgcatgacgccgggaatttgtgaagcatagggcacatctttttcatcctgtatcggcaaagcgtcaaaatcagctctgagtgccacgaccggtcccggttcaccgccttcaatacaggctgtgacaccgttgcccccgacattcgtccggatggggacgccgagcttttcataaaatgaggcgatgaacgccggtgtttttttctccttaaaggatggctcgggattcatgtgaaggtgacgcctgatttcaaccatttcctcatacagcccgtcaagctgagcgtttaagcttttttgaagtgtcgttaacgtcaaaagcgatgccccctcgtctgcttttcccatgattgtatagaaaatgtcagaagatttcaatctttttgctacgggagaatgatgatggcggcgatggtcgtgacgataagtccggccgcaacagggataaagtttttcctggcaagctcaaacgggtcaactttacaaatagccgcagcgggaatcagtgcccaagggaccaatgttccgcccccgacccagatcgctgaaatctggcccagcgccgttaaaacggccgggtccgtatgaagcgcggcagaaaacagctttgccatcgagcctgcaagagatataccggaaaaccctgacccgtcgagcccggtaatcgcaccgactgcggccagggcgatgccggcgaattctccggacatcggaaaagaatgggacagggccagtccgaggtcattgacgattcccgcagaccctttcggcagcggggtgttcaaaatatttttaaaccccgcgtcaccgagataaaagaaggccgcgatcggaatgacggggccgaatactttaaagccgaattgaaaaccgccgataaaatactcggtgatcttttctaaatgccgctctttatatacaatgaaatgaatgatcaggagaatgccgatcgcggttcctccgacgagtgccgtcgcatcgtttccttggaggcggtatacgatcatgcagataatatcggcgagaaaaacaagcggaatgaaaaccgccaggatcaccctgagttttttcggcagatacatacttgtgtccaaagaaccggagctgtccaaggagaggggggccttcgttttttttcgatcccgcatgatgaggaagaaagcggtgattgtcgtcgttaaccccatgatcaaaacgagcggaatacttgcctgcatgacatcgctcactgggatgcccgcggcatcggccgttaatttcggggccgcctgaatgacgtaatcccccgataaagcgaatccgtggccgaacaggttcatcgccatagccgcagcgatcggagaaaggcccgcccggatcgctgcgggaagcagcacagcgccgatcagcgccaccccgggtgacggccagaaaaaaagagagatggcaaacatcagacagccgataacccaatacgcgacagccggccctttcatcagctttgcaaacggagaaatcatcgcttcattaataccggttttggtcaaaaggccgctcatcgccacgataaaacaaatgataaaaatcgtcggcagcaattctccggcggcatacgtaaagctgtgaaacaggctgctgaccgaagcggagaatgaatgcgtcgtccatagcgcaatcacaaaaatgccggcgagtgaaataaaggttgtatcttttctgagaagcataaaaacgataatggccgcgataaaagcaacataaagcagatgtaccgagtagacgccgatccccaattgaaccactccgtttataaataggattgctacagggtattcataggcgggcggaaggtgcaaagaaggatgcgtaaaatcgggacatcaaaaaagccggagaatctccggcggttttcagtctattgcgtaataagcggttacataagacggacgggaaaaaatagacgtcgtgtcgataccggcagatgttccgcgttttttatgagcttcctgataagagtttgactgctgccaatcctgaaaggctttttcctcttcccacagggtcaaaatgacatacgtatcgccttcgagcggtcttaatacgcggatggctttaaaaccgggttcattttccactttgccggcgcggtttttaaaccggttttcaaacagcggacggccttcctgggtaacggcgatgttgttgaggacggcgtagcccggatttttgatttccccgacgctgtcgatgctttcataggaatggggcgcctgaaaaacggtttctccatttgtttcatgaattaaaaccgcattatcctccccttgcatcagcaccatattctcactcgggtgtttcttggcaatcgtctttaaaaaatcggctgtcccgtatgtaatataaaccttcatatcagccacctcctgcttgctagtatatcaaaagagtggtataagtttctattggcgactcattctgacataattcgaaacaatatttcccatactacaagttaagaaaggcgaggtgacttatgctgaaaaagaaaaaaagattctttattccggctgtaattgcggcggcaaccgcttttctcgcgttaatcggatacattatcattatatttctcggccattatgtcatcgatgaaaagaaattaatactgcacgcatcttcaaaaatcgtcgatcaaaacggtgatgaaatcgcgagcctctatacggaaaatcgtgagccggtatccattcagcaggttccggaagatgtgagagatgcctttatcgccgttgaagataaacggttttacgaacatcacggcattgatgtgaagtctgtcggacgggcggtgttccgggatgttttagcaggcggcaaggtggagggcggaagcacgatcacccagcagctggcgaaaaacatttttctgactcatgataaaacatttttgcgcaagacgaaggaagtcattatcgccatcaatcttgagcgtgattacagcaaggacaagctgcttgaaatgtacctgaaccagctttatttcggccatggcgtttacggcattcaagccgcgtcccactactactttaataaagaagtaaaagatttaaccgttgcagaaggagccgttctggcagcgattccgaaggcgccatctctttattcgccgattcagcatccggataaaaataaagaacggcgcgatacgattcttgcaatgatgaacgatcaaggctatatcagcgccaaggaagccgtcagagcccagggccggacattggggcttaatgtcaagaaaacatcagaaacgccttggtttgacagttatatcgatcttgtcatcaaggaggcggaagaccgttattcgatgtcaggagaacagctgcttcaaggcggttatacgatccggacgtcacttgattccaagctgcagaaaacggcatataccctcatgaaggaaagcggctattttccggggacggatcaggcggcagagggaagcgccgtctttattgataataaaaccggaggcgtgcgcgcggcggtcggcgggcgcgactacgtgacaaaaggatacaacagggttacggcgaagcggcagccgggctcaacgtttaagccgattgccgtatacgggcccgccatgcaggaagacaagttcaaaccgtattcgcttctccaagacaaactgacgtcctacgacgggtatgaaccgaaaaattatgacggacagtacaagggggaagtgacgatgcaggatgcgatcacttacagcataaatgcgcccgctgtctggacattgaagcagatcggcgtggatatgggaaaatcgtatcttgagaaaaacggcatgaacatttctgacaacggactcgcgattgcgctgggcggtctgtctgaaggcgtcactccgcttcagcttgccggagcttatcatacctttgcggcaaacggaatgtatacgaagccattttttatagagaacatcacggacgaagacggagaaacgttatccgggcctaaaaacggcaaaacgcgcgtcttcagcggacagacggcatggaatatgacgagaatgcttcagcaggtcgtaaaagaaggaaccgcttcacaaggcagctatcaaggtgacctggcggggaaaaccggcacgaccacatttaccggcatccccggcgcgacaaaggacgcctggtttgcgggatacactcccggactgacaggagccgtctggatgggctatgacaaaacggataaaacccattatctgaaaggcggcagccaatacccggtcagactctttaaagatatcgtcacaaaagcgggggaaaacggccggacattcaaaaagcctgaaaatgtgaaggaactgggcagcccgattgagctggaggcggtaaaatccctgtcggcccgttatacatttaaggcgatgggactgattacggttcaattaaaatgggatattcaaaaggatgatcgggttgtttaccgaatatatgagaagaaagacggaaaagacaagcttctggattcggtgaaaggaaaaggcagctttgacataccgtacgccaatctgttttcaggggcttcatacaaagtcgttccatttaattcgcagacgaatcaagaaggagagggaacggaatacgttcagccgaagcttttttcttcttaatcatgaattcggcgattttttgaacattaagcctcaattctataccattcagaaaaaacaaggtatagtgtaatgggcgaagaacacgaacgtatggttgcaggaggaaaggtggaaattcagatgagtaaacgagaagcgtttaatgatacgtttttaaaagcggcacggggagaaaaaacaaatcacgtccctgtctggtacatgagacaggcggggaggtctcagccggaataccgcaagctgaaagaaaagtacggcttagtcgaaattacgcatcagcccgagctgtgcgcgtatgtgacgaggctcccggtcgagcagtacggagtggacgctgccattttatataaagatattatgacgcctcttccttatatcggagtggatgttgaaataaaaaacggaatcggcccggtgatcgatcagccggtgcgctctgctgcggatattgaaaagctcggcgaactgaatcccgaacaggatgttccttacgtgctggaaacgatccgattactcgtaaacgaacagctgaatgttccgctcatcggtttttcgggagcgccttttacgctggccagttatatgattgaaggcgggccttctaaaaattacaacaaaacaaaagcgtttatgcacagtatgccgcaagcgtggcaaatgctgatggacaagctcgcggacatgattatcgtttatgtaaaagcgcagattaatgccggcgcaaaagccattcagatttttgattcatgggtcggcgcgctgaaccgcgaagattaccggcagtttataaaaccggtgatggacagaatattccgggagctttcagcagagcaagttccgctgatcatgttcggcgtaggcgcaagccacctggccggggattggcatgaccttcctcttgatgtcgtcggtcttgattggagactcggcatagatgacgccagaaaacaaggcattacaaaaacggttcagggcaatcttgatccgtcgcttcttcttgcgccttgggaagtcatcgagaaaaaagcgaaagcgatacttgatcaaggcatgaaaacggacgggtttattttcaatttagggcacggcgtattccctgatgtcaatccggcaacgctgaaaaagctgacggcgtttgtacatgaatattccgcggccaaaaaaacggaacaatcttcctgagcagatcgttggttataagaagattttcctgtcaaaatcaaggtagacagaccatcaaaagaggtgtttaacaaaatgagcagcaaaaagaaaatgggacttctcgtcatggcttacggaacgccttacaaagaagaagacatagaacgttattatacacatatcagacgcggaagaaagccggagccgcacatgcttcaagacttaaaagacagatatgaagcgatcggaggcatttctccgctggcaaaaatcacgcaggagcaggcggagaagctcgcacagcgtttaaatgaaatccaggacgacgtaacattcaaagtgtacatcggattaaaacatattgaaccgtttattgaagacgcggtggcggacatgcataaagacggccttacagaagctgtcagccttgtgctcgcccctcatttttcaacattcagcgtccagtcatacaacaaacgcgcgaaagaagaagcggagaagctcggcggcttgaccatcaagtctgttgaaagctggtatgatgaaccgaaattcgttgattattgggtcggccaggtgaagaaaacgtatgaatcaatgccgaaagaagaacgggatgacgcgatgctgatcgtctcagcgcacagccttcctgaaaaaattaaagaatacggcgatccgtatcctgaccagctggaggaatccgcaaaactgattgccgaaggcgccggaattaccgattacgcagtcggctggcaaagcgaagggaacacccctgatccgtggctcgggccggatgtgcaggatctcacgcgcgagctgtatcaaaagcatccttataaagcatttgtatacgtgcccgcaggcttcgttgccgatcatttagaggtgctttacgataatgattatgaatgcaaagctgtgaccgaagaagtcggcgcaagctactatcgtccggccatgccgaacgcacagcctgaatttatcgacgcgcttgcagcggtcgtgctgaaagagctggacaagtagaattaaacggtaaagaaggcgataaaaatgagtggcgataaaaaacatctggtcatcatcggcggcggcataacgggactagccgccgccttctacatggaaaaagaaatcaaggaaaaacagctgccgcttgaggtcaccctgatcgaagcgggcccgagagcgggcggcaaaattcagacggcgcataaagacggctacatcattgagcgggggccggattcttttttagaaaggaaaaaaagcgcgccgcagctcgttaaggatttggggcttgagcatctgctcgtcaacaatgcgaccggccagtcttacgtgctcgtcaatgagacgcttcatccgatgccgaagggcgcggtgatgggcattccgaccaaaatcgctccgttcatctccaccggtttattttctgtacccggaaaagcgcgggcggcgcttgactttgtcctgcctgcgagcaaaccgaaggaagatcagtctctgggtgaatttttccgcagacgcgtcggtgacgaagtcgttgagaatttaatagaaccgctattatcagggatttatgccggagatattgataagctgagcctcatgtccacgtttccgcaattctatcagactgagcaaaagcacagaagcctgattctcggtatgaaaaaatcacgtccgcagccttcgggacagcagctgacggccaaaaagcagggccagtttttaacggtgacgacaggacttcaaacgttggtggaggagctggaaaagcagcttacgctgacaaaggtgatgaaaggaacgaaagtcacccatatcggccgcgaggagaaaggatattccgtgacgcttgataatggcaaagtgctctatgcggaaggatgcatagtgacagcccgcataaagccgcggcgaaaatgctttctgatctgccggcggtttcatgtctcaaagatatgcattctacgtccgttgccaacgtcgccttaggttttcctgagggagccgtcaaaatggagcatgaaggtacgggattcgttatctcaagaaacagcgatttctccatcacggcctgcacatggacgaataaaaaatggccgcacgcggcgccggagggcaaaacacttctcagggcgtacgtcggaaaggccggagatgaatccatcgtagatctttcagataacgagatcattaaaatcgtaatggaagatttgaaaaaagtaatgaaaataaatggcgaaccggaaatgacctgtgtgacccgctggaacgaaagcatgccgcaataccatgtcggccataaggagcgcatcaaagagttcagagatgcgctgaaagcttcctatccgggcgtatacgcgacgggcgcgtctttcgaaggggtgggcatccccgactgtatcgaccagggaaaagccgccgtatatgattcactcgcttatttatttgaaacgtaccagcctccgttatcgtaaaacggaggttttttgcatgttcccgttctgtaaagggaacaccaataaagagaaaaaacatttgaatcttctttgcgactgtgataagttatcttatgtacaaaatgactaaaacgttcaaacggtcaatttaacgaggtgggaaacatgtccgtcgatcggaaaaagctcattctggaagcggcaacgaagtcttttacacaattcggctacaaagcaacgacaatggatctggtggcaaagcttgcaaatgtggggaagggaaccatctacacgtttttcaaaaacaaagaagaactgtttgatgatattttcaccactattttaagagaaatgaaggaacacgcagacgaagcgatgaaaccggagctttcatttcacgaaaatgttcaccgggcgcttgtcgcgattttggaattcagaaaaacacaccagctgactattaaaatttttcaggagaacgccgagattggtacaatagccgttcaggatgtcattgcgaaaatggagcgggccattctgtcatacattaaagaaaagatagaaacagccattgaaaacggaagcattaaaccgtgtgatccggaactgaccgcttttgtgatgctcaagctctacatcgcgctgatatttgactgggaaaaaaaccatccgcctcttgaaaaagagacgatcgccgaattgctggaaatgtatgttggtcaaggattatctaaataatagatgatccttcactttttaggtgccgtgaccgttttgtcaaatgagtcagtttgcggaaggaggcaacagggttgaatacaataaaaagccagtggaaagacattgtaacgaacaagaaactgttaatccccatcattgccatattattcgttccgctgatctacagcggagtgtttttgaaggcgtactgggacccgtacggcacggtggatcagctgccggttgtcgttgtcaaccaggataaaggggcggactacgaagggaaacatcttcagatcggtgacgatcttgtgaaagagttaaagaaaaatgataattttgattggcatttttcaaacgatcttgatcaatcgttaaaggacttattaaatgctaaatattatttattggtcgagattcctgaagatttttctaaaaacgccagcacggtaatggataaaaatccgaagaagctggatctgaaatatcatacgaatgccggatcaaactatgtcggcgcgacaatcggcgaaaaggcgatcgacaagctgaaagcctccgtgtcgaaagaagtgacggagcaatacgcaaaagtcatttttgacaattttaaagatattgccaaaggactcggcaaagccagcagcggcgccaagaaaatagacgacggcacgaaaaacgcgaaagacggcagcgccaagctgaaggaaaatttagcgaagcttactgaaagcaccgccaccatcggcgataaaacgcagcagcttgcagacggagcggcgaaagtgacaagcggaattcaaacgcttgacagctctatcgcaaaacttcagagcgcaagcgccgaaattcaagataaatcagggcagattgcttcaggaggaggccaagtggccagcgggctgaaaacgagccttgacgcacaaaagcagctccagcaaaagcttccggatttaacgaatggattaagcgcgttaaacagcaaggcgcaggaagtgtcgcaaaaagcggcggcatttgaagatgcgatcaattcagtcaacctctcagatattgaaaaagcggttggggagcttgagcagactgaaaaggaattgcagcagtttaagaaaaagctttctgatctgaaaaacagcctggatgcccgggatgacgcggtcaaaaaggtgattaaggacagtgatttcttaacggatgagcaaaaagcgaaacttgttcagcttctgaatgagaagcttccgaaggccgaccttccggatttagacaatatcgtcagccagcttccgtccggcggagatatccagcttccggatatgtcagtcataaaaagcgcgctggcagatgtaaaagcgaaggctgatcagctgaaagcactgcctcagtccacatcgaaactgtataacggcgcggcggcggtacaagacgcgattaaccagctgacggctggaactgataaattgtacagcggagcgcagaccgtctttgaaagccaaaacaaattgacggccggtatcggcgaatacaacagcaagttcggacagctcaaatcaggatcagaagcgttagtgtcagggagcggccaggtgtctggcggcttaacgaaactgctggacgcgcaaaacaaaatccatgacggctcgtccaaaattgagcagggtcaagcgtctctcggcaccggtttaagcaagcttttagacggcaccggacaattgtccagccagctgaaagatgcggctgatcaaaccggggacattaagacagatgacaaaacgtacagcatgtttgccgatccggtaaaaacggacgataacgcgattcattccgtgcctaactacggtaccggactgacgccttatattctctctatgggcttgtatgtcggcggattgatgctgacggtcgtattccctctgagtgaagcttcagggcgtccgagaaacggttttgaatggttcctcagcaaattcagcgtcattctgctcgtcggactgattcaatccgttatagtcgccacggttctgttaaaaggaatcgggcttgatgtggaaagcacttggagattctatctctttacgatgattaccagcatcgcgttcctgtcgatgattcaattattggcgacaacgatgggaaatccgggacgctttatcgctgtcatcattctggtgctccagcttggggcaagcggaggaaccttcccgcttgaactcctgccgggattctatcaagtgattcacggggcactgccgatgacttacagcatcaacgggttccgtgccgtcatttcaaatggcgattacggctatatgtggcagcaggcatccattctgttgggcatcgccgttgtcatgatcgcgctgaccatcgtgtattttacggtgcaaagcaaaaaagaacacaaaacggaagaagaaataacagcataagaaaaagaggcgctgagcagatgctcagggcctcttttttttgatttcgattaaaatccccatctcaccaaaagtccggtatacgtcaatccgccgccgaatccgaacaataccagcgtctggccttccgacagtttttttgctttcacagcttcatccaaagcgagaataatagaaaccgatgaagtgttgccgtaatattcaacgcttgtcaatgtccgttcaagcgggaagggcagtttttcacagatggattcgatcatccgcatgttggcgctgtgaggaacgaaccaatccagatcgtcttttgaaaagccggctttttctaaaagggcattgcattcctcaggcacggttctggccgcccatttatatacttcgcgcccgttttgcaccatatttcctccgcctttaagcggctcgccgtttaattctgcgctcagtcccgtgcgatacagcacgtccgcgcttcctcccgctgttccttgcacggctgccaaaaagcccggcgctgattcgtcgcgttccaccaatagggcgcctgcagcatctccgaaaagaacgcaggtcgtccggtcagtataatccgttacctttgataatgtttcaccggcaatgacaatcactttttgatgggaaccggcggtaattaatgcgtctgcgagctgaaggccgtaagtgagtccggcgcatgtggcgttaatatcaagcgctcccgtgtgcggccagccgaagtaagcctgcacgcgtgccgcggtgcttggaaacgcatagtccgccgtcgttgtggcgacaagaatcatatcgacatcatcaagagttccgctgtatcgttctgcaaggtttttcaccgcttccacacacaaatccgatgtgaattcatgttcgccggcaatgcgtctttccttcataccggtgcgctggacgatccattcatcagatgtatcgacgatgcgctctaaatccgcgtttgttaatcggcgtgccggagcatatgtaccgattgctgtaattttagattttgacatgaaaaaatcactcctttatatcagattataacacctgatattattacttggtactaattttaataaaaaaacccaagcagcatccgctgtttggggagcatgagaattttatttgtaaaacgggcttgtgtgaacgattaccaatgacggcagcagcggcggcatgaatgatgatgcttctttttgtctttcttctttttgtctttcttctttttacaagggtcttcttttttctttttacagtgatctttttcttttttacagcaccagaaggctgcaccagaccaatcatcctcaaaccaatcctcaaaccaatcattatgaaaccttttccgcttgtgcggtttacggctgatcatacatttccctcctatgctcatgctcccttcattctatgaaaaaagagcaggaaaagattggacgggttatggatcaaaagagtatattttaagaagaataaaattgataggaggaatgacctgtggaaaatatgaaacatacgatggaactgattaaagaactggtgtcgattccgagtccgacgggcaatacatacgaggttgtcgcctatacagaaagtcttttaaaagaatggggcgtctcctcttacagaaaccgcaaaggcggtctttttgtcacaattcccggccgtgatgacaagaaacacagattgctgacggcgcatgtcgatacgctcggcgcgatggtaaaggaaataaagtcggacggccggctgaagattgacttgatcggcggcttccgatatcactcgattgaaggggaatattgcgagatccaaacttcttccggcaaaacctatacaggcaccatcttaatgcatcagacttcagtgcacgtctacaaggacgccggcaaggcagagcggaatcaggagaatatggaagtccgccttgatgagcctgtccggacgaaggaagagacgtccgatctcggcatcagggtcggcgatttcatctcatttgacccgcgcgtgcagattacgccgagcggctttattaagtcccggcatcttgatgacaaagcgagcgtggctctgctcttgaatttaatccgccgcatcacggaagagaaaatcgaacttccgtatacgacgcattttctgatttctaataatgaagaaatcggctacggcggcaattccaacattcctcctgagaccgtcgaatacttggctgttgatatgggagcgatcggcgacggccagtctacggatgaatataccgtctccatttgcgtgaaggatgcgagcggaccgtaccattatcagctcagaaaacatctggccgggcttgcggagcgctatggcattgattatcagcttgatatttatccgtattacggttctgatgcctcagcagccatccgttcgggccatgacatcgttcacgggctgatcggcccgggaattgacgcttcacacgcttttgaacgcacgcatgaattatcgcttcttaatacggcgaagcttttgcaccggtacgttctatcgccgatggcataaaaaaccctgcgcggaaatcattccgtgcagggttttcattttaacctgaaatggttgtgttttgttctgttttggcgaggctcatgaccttcgcgcctttaacgggatcatactggccttcccattttgacatcacaacggatgccagcgcgtttccggtcagattgacgaccgtgcgggccatgtccataatccggtcaacaccggcgatgaatgcaaggccttctgcaggaatgttgaatgcgcctaatgtcgcaagcaggacgacgaaagaagtcccgggcacggcagccattcctttggaagtgaccatcaagacaagcacaagggtaatctgctgccaaatggacaagtcaatgtggtatacctgagcgaggaataaagcggcgatagattggtacagcacagatccgtctaagttaaaggtatatccgatcggcacaacaaaggaaacaatacctttcggacagccgatcttctccattttttccataacgcgggggagtacggtttcggagcttgacgtactgaacgctaataaaatttcatccttcatataggcgaggaatttgaaaatgtttactccggcaagctttccgacgattccgaatacaacaatgagaaagaaagccaaagctacatacactaaaccgaccagtttaccgagtgaaagcagggaactgagcccaaatttggaaacggtaacaccaatcaacgcaaaaacaccaaacggcgcaactttcatgacgaggttcacaacatggaacatcgcatgagaaacaccttcaaagaaggccaagacaggctttcctttttcaccgattgccgagatgccgagtgcaaacagcacggtaaagcagatgatggcaagcagatctccttcggctaatgattggaagaagtttgtcggtacgatatgcaggaatgtgtctgcgatagatttgttattttgttctttttctgtttcaacatattgactgatatctgtcttttgagcttcatgtatattaacgcctgttcccggatgaaacagattcgccaaagccagcccgagaataatggcaaaagtggtaatgatctcaaaatacaaaatcgttttgaagcctaattttccgacttgttttccgcttcccgcgccggcaacgccgatgattaagctggagacgacaattggaatcactatcattttgattaagcgtaaaaacaaatcgccgataggctgtaaatatgttggaatggcgggattgccgtaccagatgacaccgactacaaccctagtatgagtccgacgaaaatttgcgtcgctagtccaaagcgtaattttttcatagattacctcccgaagaaaaaagtgcaataagtatctaaaaagatagctattagaacaaattataatagaaaagaaaacaatccgtctatagaaaaatatagattgaaaatactgaatcttttaaaacgtacagataattgctaataatggtgaataacgccctattcagaaagtatgatgacggccgaaaaaacgggcgccgcacaacttagaattgtgcggcgccctattgtcacatatccttaattttcaagcagtcattgcacagattaatgtgacactcatactgctcaacaatctcatttccgcattcttcgcatttcttaccgggtaaatttctgaaaaaatccgacatcttttccaacatacccatccctctttcattgttttgtctctacattgtattataacagttttggaaaatcaacggctgttttggcacaatgtttaaaacatgcaatttgtacgaaaaataggtatattggaggaaaggatctttttatcataaacattcggagggtcatatgaaagttacagttattggatgctgcggcgggtttccggccgcaaacgaagcaacttcaggctatctgtttcagtccggcggctattctctgctcgtcgattgcggaagcgccgtattatcaaagctgtttgcctatgttccggcagaagagcttgatgccgtcattttgtcccattatcaccatgatcacatcgctgatatcgggccgcttcaatttgccaaacaggtcggctcctttctcggaaaagggacgcatgcactgccgatttacgggcatgatgctgatatagaacagtttgagcgtcttacatataaaacgcatacgaaaggagtggcctatcagccggaccgcccgctttctgccgggccgttcaccattaccttcctgaaaacggtgcatccggtcacttgttatgcgatgcggattactgacggttcagcttctgttgtgtatacggctgattcaagctaccaggacgcgtttatcccgtttgcggaaaatgccgatctgctgatctgcgagtgcaatttttacgcggaccaggacggcacgtcagccggccatatgaacagtttggaagccggacgtatcgcggaggaggccggagcgggggagctgattctcacacatctgcctcatttcggcgagcaccggaagctgaaagaagaagcggaatccgtgttcgggggcgaagtgacaatcgccgcttccggattgaagtgggagaaataaaggaggagcaccatgttatttatcgacaaccaaaacataaccgacccgaggatcaacctcgcaatcgaggaatattgcgtgaagcatctcgaccctgaacagacatacctgctgttttatgtcaatcagccgtcgattatcatcgggaagaaccaaaacacaatagaagaaatcaatacgaaatacgtagaagataacggaatcatcgtcgtccgcaggctgtcaggaggcggcgcggtttaccatgacctcgggaatctgaatttcagttttatcaccaaggatgacggcgacagcttccacaattttaaaaaattcaccgaacccgttattcaggcgctgcgccagctcggtgtggaagctgaattaagcggccgaaacgacatcgtcgcggacggcagaaaaatttccggcaacgctcaattttcgacgaaagggcgtattttcagccacggaacattaatgctggattccgccattgatcatgtcgtgtcagccttaaaagtgaaaaaagacaaaattgaatcaaaaggcattaagtcaatcagaagccgtgtcgccaacatcagcgagtttcttgatgacaaaatgacggcggacgaattcaaaaaacatctgcttcaccatatttttaatacaaatgatctttccgaagtgccggaatataaactgaccgatgaagactggaaagcgatccggaagatttccgaagagcgctatcaaaactgggactggaatttcggaaggtcgcccgcattcaaccttcagcattcgaaacgttatccggtcggatcgattgatctgcgtcttgaagtgaaaaaaggaatcattcaggactgcaaaattttcggtgatttcttcggtgcgaaagatgtgagtgaagtcgaacaggcgctgaccggaaaacagtatgacagaaccgctatcagggaggcgctggccggaatcgatctgaaacagtatttcggcaaaatagagctggaagatttcctcgagctgatttattagaacatttgccgaacgcatgatttgaatctgcgcccgtttttgtgaaatgatagaaccataatgaatggggagggatcatgatgaaagtatttctcatcggagcaaacgggcagatcggacagcgtctgaccgggctgtttcaaaaagacggcacgcatacgctgcgggcgatggtccggaaagaagagcagaaagaagcgcttcaagccgcgggaacagaagccgttcttgcagatttggaaggaagcacggaagacatcgcgaaagccgctgaaggctgtgacgcgattgtgtttaccgccggatcaggaggaagcaccggatacgataagacgcttctgattgatcttgacggagcggcgaaagcgatagaagcggcaaagaaggccggcatcaagcggttcattatggtaagcgcccttcaggctcataaccgcgacaattggaatgaagcgctgaagccgtattatgccgcaaagcattatgcggataaaattcttgaagcgagcggtctgacgtatacgattatccggccgggcgggttattaaatgatcccggcacgggaaatatcaaagccgcagccgatttagaaagaggctccatttcaagagacgatgtcgccaagaccgttatcgcatcccttgatgaaccgaatacgtatgaaaaagcgttcgatctgacagcgggcggcacgccggtcagtgaagcgctgaaacaattatagtttccggttttacggcactcggggctttttgcccttgagtgtttttctatatttttctataataaaagtgaacgtttattccggataaatgaatgactattcattcattatatttttaaaggggtgggaaaatgaatctggtttccaaattggaagaaacggcatcgcagaaaccggaaaaaccagcttgtctgtttcaagatcagtacatgacgtatgaggagctggcaggtaaaatcaaagcatttgcaaacggcttggaggacaggggactgaaaaaaggggatcatctcgcgctgctgctcggaaatacgcctgattttgttattgcgtttttcggcgcgttaaaagcgggaattgtcgtcatacctgttaatccggcatacacaccttcagaaatcgcatacatgctgaaaaacggcgatgtcaaagcgatcgccggcatcgacctattaattcccgtatttgaaagcctgcacggctcgctgccgctgctggagcatatcattatcagccagacagcagagaacgctccatcgacagaagaccctcaattgcgcttaaaaatgacaacgtttacaaaaatgctccgcccggcggagcgcagcagaacttatccgacattgtccaaagacgatactgccgtcattttatacacctcagggacgaccggaaaaccgaaaggcgccatgctcacccatcagaatcttttctccaatgcaaatgatgtcgccggatacttaggaatgaatgagaaagacaaaattgtggcggcattgccgatgtttcacgttttttgtttaaccgtttgtatgaatgcgcctctgatgagcggagcgtgtgtcttaatcgagccgcaattcagcccggcttctgtgtttaaactgattaaaagccgtcaggcaaccatttttgccggcgttccgacgatgtataactatctgtatcaatacgagcacggcaaggcggaggattttgcgtccgtcagactgtgcatttcaggcggggcctccatgccggtcgctctgttgcagacgtttgaacaaacctttgacgtcaccattctggagggatacggactttctgaagcgtctccggttacttgttttaatccgtttgaccgggggagaaagcccggctcgatcgggacgaatattttacatgtcgaaaataaagtcgtcgatacgctcggacgcgaattgcccgaccatcaagtgggagaattgatcgtgaaagggccgaatgtgatgaaaggctattacaagatgcccgaggagacggagcacgcgctgaaagacggctggctgtacacgggtgatttggcgaagcgcgacgaagacggttatttttatatcgtcgacagaaaaaaagatatgattctcgtcggcggatacaatgtctatccgcgcgaagtagaagaagtgctctacagccatgagggcattaaagaagccgtggtcatcggcgttcctgacgccaaaacgggggaagcggtgcatgcttatatagtgcctgcggacggtgagctgacagagcaggcggttttcgattactgtgaaacacatttggcaaaatataagcggccggcggaagtggtttttcttgatgagattccgaagaacgcgaccgggaagctgctgagaagggcggtccgggacatgcttccgaaatgacggacgaaaagcgaagccgggggcttcgcttttacatgctgatccggtcagctgtgcgattcttccttaatgatgctttgcacaagcttcgtatcatgccgggtcagtttgtaatacgtgtttttatgcttgtacatcatataattgccgctttcgagccacatactgaatgaatcaaaacggtcttcatggtatttgaccgttccgtcgtaatcgggagacacgcttttggtcagtttgacttgttttccttggttcaagatatcgagcatatcttttacattctgcctgtctttaattttgatttctttttttccgttctctgacagaataatcagatctgcgttgcttgatggaaacacatcgccggtccggctgtatacatagaagaaagcaataaccaaaagggcgattactacaataaacgcgattatttttttcatattcatcactccgtcttttagtctttcccgcttcctgttgttccattcttttctgttgtgaaaagattaacatccgtttcggaggcttggttctatttatttgcatttatgcttacaataggagtaagtcataaggctaaggagggagacttccatgcgcaaatggatagcggcagcgggacttgcctatgtgctgtacggcctttttttctattggtatttctttatgacaggagactccgccgtcccggaggccgtaaagggaacgaaagccgatccgtcctcgttcatggacccgggccgcctggcagccgctgaaaacttttcaaatgtaaaggattttttatttttcatcggagcgccgttagattggtttttattttttctgctgctcattacggggcttgcaaaaaaaataaagcattggctggaagcagcggtgcgctttcgggtgctgcaaatcgtaagcttcgtatttgtgatttcactcatcgttacggcggcttcgcttccgcttgagtggatcggatatcgggtttcgcttgcgtatcatatttcgacgcagacagcagcaagctggataagagaccatgtcattgatttctggatcagttttccgctgtttgccgtgtgtgtgcttgtgttttactggctgatcacaaagcatacaaaaaaatggtggttttacgcttggtgtcttactgtgccgtttaccctgtttttgtttttcctgcagccggtcgtgattgatcctttatacaatgatttctatccgctgaaagacaaggagctggaaagcaaaattttgtcgcttgccgacaaggccgacattccggccagccatgtgtatgaagtaaatatgtcggagaaaacgaatgcgctgaatgcgtatgtgacgggcatcggttcgaataagcggatcgttttgtgggatacgacgcttaacaaactgaaggatcgggaaattttgttcattatggggcatgagatggggcactatgtgatgaagcacgtgtacatcggactggccgggtatctgctgctgtcattagccgggttttatatcattgacaagctttataagcggctgtccaaattcttcggccgaatgcttcatataaaggggcctgaagatctggccgccctcccgctgttattgctgctcatatccgttctcagttttgcttctgatccgattacgaacgccgtctcccggtatcaggaaaacgccgccgaccgttacggcatcgagctgaccggaaaccgggaagcggcgattgagacgtttcaggacttggccgatacgggactgagccgggtcaacccgccgtttctcgtcaaaattttcagagggagccacccgtcgatcatggagcggattgaacatgcggaggaagaaaaataataaaaaaaccggcggggccatggccgacgccggttttttatgttttactgagctgccgcctgtacgttgatcagcccttttccatagtagaaagcatcaccaagttttgtagtggtgttttctaaactgctgcggacttgagtgtttgtccagttcgggtgcttagaaagaatcaaagcagccgctccggcaacgtgcggagatgccattgacgtaccattgtacgctccgtatttgtttccaggaagcgtgctttggatagagacgcctggtgccatgacatcaagctcagaacctacgcttgagaaagatgctctttggttgctgctgttaacagcgcctaccgcaatgacagaagggtatttaccagggtagcccactgtgcttgagccgccggaagtgccttcgttaccggctgccgcaaccactacgacgccggaagcaacggctttgtcaactgccgcttttaacgctgcagaaccagaaggtccgccgaggctcatgttaataacgtccatattgtttgcgatcgcccactcaattccgttaatgatccagctgtactggccggaaccgtcagcgccgagaacttttacagcgtaaagagatgcgcttggcgcaacgcctaatacaccgactgagttattaagagctgcaactgtaccggcaacgtgagttccgtgagagttgttatcttggaaaggatttgtttcagaaggaaccatgctggctccgcctgctacctttaaatcaggatgagaagaatcgataccgctgtcgataaccgctactttaacatttgatccggtgaagccttgagagtgcagtgcaggggctttaatctgtgatacgccgtaaggcacggactgcgcgtacgcctgtgcaacgtgatcttcttcaacgtaagcgacgctagggtcttttttcagctcttttacagctttttcatttaatgtagctgaagctgcgtctacatatttgaattgcttttccactttcccgcctttttcagaaatgacatcttttttcttggcggcgctcatcgtgctcattgtctgcttaaatccgacaatatatttcttttccccgtttgatttccctgcagcctgggcagaagtcgtgctgccgaacgccatcgtaaagattaacgctaaagcaaacagcaaactgatccatacctttttgcctctcactctttatccactccttttttcatttgcagaataaccaatagacagattattctgtggattaattgtatagtatggaataatattttagtagacccaatttttttcagtttgttttatttctatttaggtatatcatctctctttcgtttaataggaacccgaaatatttaaattttaatggaaaaaaccgatggaaggacatgagtatttgtacacagccgcaatcgctctcttgtttactgggtcgaacggtttgattccatttttggaagctgaggcaaaaacaggataaatgtcaccttttgttgaatgcagaagtctgatggaaacgaaagcggaatgaaataaagcggccggcatgaatcagtctttgactttcttgagggagaaaagctgtgaaaccattttataaaaataatgataatgaatatcattgatacttatattgtcaatgatataattgcggaaaaacgaaagagcgggaacagatgaaaccaattttcagtatgctgatgatcttatccgttctcttcataacggcatgctcagaacaggaacatgaaaccgccgtcaggcatgatctggggacggcgcatgtggctgcgcacccgcagcgcatcgccgtattgaatgagggctttattgacaccctccatgatctcggtataaagccggcggccgcggcggataaccggaaagagcgaaacgacggcagtccgtccgtcgggcccccgtcacatcccgatttgaaaaaaatcacttcgttaaaacccgatctcatcattgcagactcaagcctgcacagggggatataccatgagctgacaaagatcgctccgacaatcgctttgaaaaatgaagctgcggattatcaggatgcggttgatgctgcccttaccattgaaaaggcggtcggtaaagagggcatcatagagaaacaattgtcggctcaggaagaaaagctgaatgacatcaaaagaaagctggatgcagaaggcggcacgattttattaattgacgctgcaaatggcagcatttccgtaaaggatgaccggtttttcacatcccggcttttgacgctcgcagggtttacatatgcggtccagacggattccggcgggaaatcagacgctatcaaaatgaggcccgggcagcttttgcatatcgatcctgattacatcgtactattggacggtgaggaagaactcgaaaaaaatcacctctggaaacagctgactgccgtaaaaaacggacacgtttaccgcgcggacagggcggtatggacggagcgccggagcattgacggtgcggacgccgtattacatgatcttcagaaaaaaatgctcgccaaaaaggcccaaaactaattcgggcctttttgttatgattctgataggtggctgcttacattgtaatctttgacgcgccacttattttcaattcgttcgatattgctcaggcacgcattgacaagctttgcgttttgtatgccggtatcaccgtcagaaatagcggacaagagggcgtgaatagctgcgccgtgagcgacgatcagtactttttgatcaggaaaccgctcctgaactttcactaaaccggcaagcattctgtctgtcagctcttctgcggtctccatgttcgggtagtttttatccgggtagcgcttcgaccgttccggcaaagacattccttccgcatcaccgtagctccgttctctgaaatcttccatgacgacaatgggaagattcaaaaacccgttaataatgtcagctgtttttctggcccgtttcatcgggctcgagacgatgacatcccattcggacccctttaagtactctcctgtttctttcgcctgacgctctcccgtcgcatttaacggaatatccgatttgccttgaagcttcttttgggcattccaatcagtctctccatgtcttactaaacaaacggcagtcataaagtctccactccgatcattttttatcgatatcatctattatactgccgttacgttaacacttcaaagagaagcgccagtccgactccgcctccgctgccgatcgctgctgctgcgtagcgggcatccgggcgtctttttgcttcataaaaaagccgggtgataagcgccgctccggaagccccgtacggatgcccgacggccagagcgccgccccggacatttattttagaatacggcacttgaagctgctgtgaaaaaacgcatattttgacggcaaacgcctcgttgatttcgtatatatcaatatcatccggtgacaggtcccgttccttcaaaagctttttgacggcataaaccggagctgctgacggataatgcggatggacgccgcttaccgcgcttccgataaaacgcaatcccggctttaaaccgagagaccgcgctttttgttcttccatcacacaaactgccgccgccccgtcagaaattccgcagctgttggccgcggtgacagagcctccggactgaaagacgggtttggcgcgggcgatgagaggccccatgttccgctttttcagcatgttttcgtcagcggcgaatccgtgacaggggagaatttcccggcggtacaagccgtcttcgtgcgctttgacgctccgttcatagctgagaagggcatattcatcctgcatctttctcgttacgccgtaagcctgtgccgtatactcggccgctatgcccatatcaggatcgccgatgtgttcaggagaaaagcgcgcccgggatgagaaaggggaacggctgctgctctccgctcctcccgcgatgtatgtgctccccgcgccggctttaacaaagtggcacgcgaccctcacggcgtccaatccggaaccgcactgcctgtcgatggtcgtaccggacacgctcaaaggaagcccggcggccaaggctgacagccgggcgaggttcccgccgcggcccgtcgcgtttccgatcaggacttcatcaatgtcttcgggcatgttccggctcaaatgtcggatcagcggagctgccaaatcttcggggagacagtcttttaacaggccgttttcccgggcgaaaatcgtccgcttcgcatccgtaattacagcttccattccatcatgtcctttgcctgcttttgtacggcggcacgggcgatctttccgccggctgtttccggtatttctgaaaacagccattttttcgggattttatatgccgccagctgctcgcggcactgtttcttcagttcctttacatttgcatgtccgtcgatcaccgcaacggcgatgctgccccaataatcatcaggaatgccgatgacggccgcttttctgacgcccggacagcggttgagcacacgttctatctcttccgggaatacattcaggccgcctgatacgatcatcccgttttcacgtccttcgatataaagatagccttcacgatcgatatatcccatgtcatcaaccgtcatccagccggaatcatcaggttttgcgccgttgatgtatccggaaaatttcatcgggctgttcacaaaaatcttccccgtttcgcccggcatgcagcgttccccgccgggccggcggatttcgattgtaacattttcaaacggacggcccgccgcgtcaggcttccgggcgctgtcttcaggcgataagaacgccacgaaactcagctcagacgttccgtaaaaatcgtacaaccgtaaatggggatagcgctctgacagcgcttgtttagacgaagcgggccagtctgcaccggaagaaatcaccttgagcggtgtatccggaaacgcctctagtgagagcagggcgtccgtcattgtcggaacggtatatagaacgtcagcttgtctgagccggtctttcattccggccggattgaattttctttgaaggaggacggttccgccgataaacaaagtgctgacggcgccgtataaaaagtgtgacgagcgaagcgtgcccggtaccagcactttgtcatcaggggaaatgccgaattcacgtttcgtacaagaaaagctctccagccacgaacggtgagagcgggtgaaggctttcggcttaccggtcgatcccgaggtgaatccggtataaaagggcaggccggtgtttttgataaaagtgccttccgttttttccgcctcgatcaaaggcccgcattcatcccacaggatgacaggcgttttgatgccgtccagtctgccgctcagccggcggtcacagatgacgaggtcggttttgctgatgtgcagctggtccgcgagttccgccgcagccgagcggggatctaacggaaccgccgtgcagccggcatgcgccgcccctgcgaaaagttgtaaaaatgggatgccgttcggcagtaatattgcaatgttttccggcttatctgaaaggctgccaagccagtttgcggtttggtttactagcctgttccaagtttgataggtgatctgttctgtgtctgtctgaattgcgatccgttccggcgcttgtccggctgtatctgaatatgatgatgtaatcatgatgactaaaatcagcttcctttcgtcggcaaaagccggcttgcttgaagagtttttctgattcttacggctgcgaatgaggctgcggccgctttaagcagatctccgggcacatagatgaggctgagctttacggcagtcaagatatcaatgtgcattataaaagcctgaacgggaatgccgatgacatacaaaaacagcacgccgaacaagaactgtctgataaacaaatgggggacagcagctgagcgaaggccttggatgctgaggctcagcagtaatgccgccagcggatatgcgatgagatatccggcgctcggcccgaaaaaaaccccgaacccgcctcttccgcctgaaaggagaggcgctccgcatgccacaatcagcaaaaaaagcaattggcttaaaaatgccgctttcggtttaaggatgcttcctgataagagcacaccgatcgtctggagcgtaatcggaaccggcgtaaaggataagaaaagcggcggaagcagccccaaaagtcccataatggcggtaaacacggcaatatgcatcatttctgtcaatttcattatgtattcctccagcttatcaaaatatgtttatacaataaagcgagtctttatatatgtcaactctattatattttaagttaacattaaaaagaccggccctttatgaaaaaggccggtcggtttatctttattcttctgtaaggataacaagtgaatcaacggatgatgcaacgtgggaaacggcgcggctgacttcttgaaggccgccgagaaaggcctgcaaatcaacgtcgattttgcctgtctggtctttgctcgttttcatgctttggacgatgtcatcaaacagacggttgatctgcgtcattttttctttcgtttcgcttacaagtccgtttacatctttaatatgtttggacacgatgttgatttgtgtattggtattgttcacgagctctgatacggtggaaacggtttttttcgtatcctctgaaagcttccttacctccgtcgcgacaacggcgaaccctttgccgtgctctccggctctggcggattctattgaagcgttgagtgacaggagattcgtttgctcggcgatccccgtcacgatgccgaagattttttcgatctgctgggcgatgtcattcagcttgtccatttcttcttcaatctgcagaaggctggcgtcgattttattcatctgctgctgctggctttcaagctcttttttcccgccgattgatttttcttcgacatgtacggaagtgacggtgccggcttttgacgcctcggaaatgccctcagatttatcgaccagctcctgcacggctctgctcgtttctgaaaacaaatcagcgagtgatccggatgtttcctggattttctgatgaagacgggctttcttttcctcttgttcgtcacgctggcagttatattcagtctggaatgcttcaaggacgagctgctgttcaagattcaatattttcgtcgtcgctttgatcgcttttaaaagctcatgcaaatccggaatggttgcttcatatatgttcatcatcgacagaagcagatcctgaaacgctcccatataccatttcggttcaaggccgatccgcaagtggatggaagcgatgcgctgtcttttttcaatgaattcatcatcaattgtgccggcgaacatctcatggatatgacgccgtaatgtttttttcaggcgctcgaccgtgctgtggtcgttaatgatcgtcattaatgatttttcgtgatccaggtttcggtaaaaggaatcgacgattgttgagatatgttctttaattaacggctgcagctcttcaagcacatgaagttcttcgtttccgagcctgaccattttcagctgtttttggacatctgcatattgatttgaaagcgcgatgcgtttttttccatcggcttctgaaaaatatgctgtttcttttttgcggtcttttttaaataacaatattagttcccccagatattctctttttctttttatcggtttggaaggaacttgaatgaaggaatctgataaaaatattttaatgcggaaaaaaataaaaccattcgtacagaatggtttagtcaatcttgggtgagacgtttcagcggcttgatggcgggaccttcggcaaccccgccgtcgggtgtgaaccgggacccgtgacatggacagtcccacgtccgttcgccgtcattccattcaacctcacagcctaaatgggtgcatgtcgtatcgacaagatgcagacagcctttttcatctttataggcgccggcccgtttgccgtttaccgttacgatttttccctcccgggcccaagactctcaggcgaagcgtccggcctctcaagtttgcccgagataaggtgtttggccacgtcggcattataggaaatcagttttttcagtccgggatctgcgtggaagcgtgacggaataaacaggccggaaaacgggttctttttgttttgaatatgatcagccaaaagcttcgcggcgagcgctgagcttgtcatgccccattttttaaaaccggtcgccgccaaaatatgttcttcatcgcctgagatcggaccgatgaacggaattttgtcaatggtgacaaggtcttgtgcagaccaatgatatgggatgctttcaactccgattgtgtcttccgcaaattgtttcagcgcttcgtaatgcccggacatttcttttccttggcctgttttgtggctttcaccgccgacaagcaccagtttttcaccgttcaaatcggtgtatcgcagtgatctggacggcttgtctatgctgagatacatcccgtccggatacgcttgtttcggttttaccgcgagtacgtaggatctgctggcatacattctggcggcataaagcccgcctccgtcataaaaaggaaagtgggaagcgcagacaatgtagctgcacttgatgccgtgtctgtttttcgtgaccacttccggctgcggttctttttttatgtcgatcgcagccgtctgttcaaaaatccgcgccccgtttttaacgatctctttgacgagcgccgcaccatataaaagcggatggaattgcgcctgattcttcatggcgaggccgagcctgcaatcaacggggacgggaagttctttcacaagctcgtgttcaataccgagcttggtataagcttcctgctcactgcgcatttttttgacgcctgattctgtattggtgtaaagatatgcgtcttgttcaatcagtctgcagtcaatcgaaaggtccttgatgatctgcttcatgtcttccatggcgcggagatgggcttcgaaatacagccttgcgctggtcaggccgatctgctgaataagatcggcatagatgaaatcatgctgggcggtgatttttgcggtcgtgcccgcggtcgtcccgtttaaaatccggtctgcttcaatgacagcgacacggaaacctcttttcgtcagttcgtatgccgttgtcaggcccgtaattcctccgccgatcaccgcaacgtcacattccgtatcttcagtgagggcgggaaaggaaggaatgtcagctgttgctttccaataggaagccggttcctcgtttgaaaaagtagtcaattcagatttacctcctctgttgtatattcttaatttttccaataagactctgttcatacatgaaattcgtataagatgctcaaattactcataatatagtaattaatgtaaaggagtgatcaaaatggcgaatcagaagaagaaaaccttgccgccgcagcatcaaaaccggcagccgggctttgaatatgtaatggacccgcgccccgtttttgacaaaccgaaagcggcgaaaaaacttgaagggaaaacggcgatcatcacgggcggagacagcgggatcggccgcgccgtatccgttttattcgcaaaggaaggcgctaatgtggtcatcgtttactttgatgagcatcaggatgccgaagagacgaagcaatatgtagaaaaagaaggggcgaagtgtctgctgatcgcaggggatgtcggcgacgaagccttttgcaacgatgtcatccgccaggcgggccaagcctttccttccattgacatcctggtcaacaacgcgggtgagcagcacgtgcagccggggattgagaaaatcacgagccaccagctcatcagaacgtttcagacgaatattttttcaatgttttacttgacgaaagccgcgctccctcacctgaaaagaggaagttcaatcattaatacggcctccattaccgcctataaaggccacaaaacattgattgactattcagcgacaaaaggggcgatcgtcacgtttacaagatctctttcccaatctcttgtcactcagggcatcagggtaaacgcagtggcgccggggccgatctggacgccgctgatcccggcgagcttctcggcgaaggaagtggaagtcttcggctcagacgtgccgatgcagcgcccgggagagcctgttgaagtggcgccgagctatttgtacttagcaagcgatgattcttcctatgtcacgggacagacgattcatgtgaacggcggcaccatcgtaaacggataatgtaaaaaaagccaatccatatggattggcttattcactctgtttgagagcggcatattcttttgaaagcgtgaggaacgcttctttatttttatcatcaagcgccttattaatctgcattgtcagcatggcgatccggcgtttatacaaggattcatcaagcaccatttgaatgtaaatatcggccattgtcacatcgaattcgtttgctttttccgtgttgcgggacttcatgagctcagtgtacgactttttctctttcataaagaatccccccaatgccttttttatagtatatggataacggccggaaaaatcaattaatttttataatctttagataactaatacttggaaatatatcgacatatcctgcaaattgacgaaaaaacgaaaatgatcattgtataaatgaggtgaaatgaaaaagaaaaataatatttaaatagtaatttaagactaaattacagctttaaaaggtgatttttagctatattcaaaaaaaacctgtcgttttccaattacagatgatagattattagtataaattttcaagaaaaggattggaggctgcacatcatgtgccagaaaacacacgcacccttagaaagctacgaagtaaatcgttcaaccatcgctgttttgcctgaggaaatagacggtaaaatggggtcgaaggtcattgaaaaagactgcattctgtatgtcagcatgaagccgattcacatcatcgacagaagctgccgctactttggctccagctatgccgggagaaaagcgggaacatatgaagcgattaaaatttctcacaagccgccgattatggtggacccttcaaatcacatctttttattccctacactttcttctgcaaggcctcaatgcggctggatatctcatgtgcacgttaaagattttcaaccgacggcatttgatgacacagcggtcacgttctcaaacggcaaaacgatggaactggaagtatcctatcattcttttgaaaatcaggtttacagaaccgcctatctcagaaccacttttcaggacaggatgggcagtcatatcccgaagcggcaggaattcatgctgtatccgaaagaagagcggacaagaatgatctacgactttattttgcgggagctgggggagagatattagagaaagctgtgatgtaaagggacgggccctttccttttgggaagggctttttcgatttacatgcccggatagagttgtatcgtgtccgtctgttggctatgatgatgtaaagagtaatgatatttcattttaggagagatgggcatggatgtgtttgcaaaatatgtatcagaaatcgataacccggatcaccgtctcaaagcagaggaaattttgtcgtggacggctgaccaatttccgaacttagaagcgcagatcaagtggaacaaaccgacatttaccgatcacggcacctatatcattatgtttgccgcggcaaaaaatcatttgagcattttacctgaaaaagagacgatggagcattttgccgatgacatcgcccaagccgggtacagcgcttcttcacgcctgttcagaattcggtggactgatccggtgcactatgatctgcttaagaagatcatcgaatttaacatcaaagaaaaagctgaaaatccggggttttggcgttagcggacgtgatgttgaaggaggaagacatggacgttttcaaagactatttatcaagtatcgacagccctgaccatcgtctgcgaatggaggaaatcctgtcgtggacgtctgagcaattcccgggtttaacaccgcagatcaagtggaacacgccgatgtttaccgatcacggcacctttattatcggctttgcggcagcaaagcatcatgtaagtgtttctcccgaagaagctggaattgcgcattttgccgacgacattgcccgtgccggctacagcgctacttcccgtttgttcagaattcaatggactgaaccggtgtattatgagctgcttgaacgcatgattcaatttaatatcaaggataaggcggactgctcagcgttttggcggaaataatgaaagaaatgttaaaaaaacaaccctgaggagggctgtttttttattaaacgtaatccgaaaaataagggatttgcgtatccggcagacccttacgaaacgcacgatgaaagaaatcgtgcgttcaaaattctttatttgacgacagacatgctgacggtgctgcctgacactgtcaatttggcaaaatcctgtgtatcaatcacaggtgtgactgctttattgtcgatcgtgatgttcgtaaaggctgtcgagaagtttgatttgatgtaagggcgctgatcctctgatgtgaccgcgacggtggcgagcgctttccattttgagacagagcctacattggtttgggcgagttctgagatgatgcggccggtgtatccgtcattattcgtgccccaatatgtggcgcgggtattgccgttcagatttttgtaaatggtcagctgtacggtgctgccgggccggaagcctttcgtataagtgaattggctttctccttccagataccggacctggccttgtccctttgaaccgactttcatgatcggtttccatacatgataggtgtcactgtactgaagcccgatatcagcctctgtgcctccggtaaatcctgagtaaatataggctgtcccatttgacacctgaatcgagcttggaagctgaattttcgtgacgagaactgagcccgtgctgttcagataggcccttccgccgattcctttactgagctgggacgccgcttccgccgtattgggactgatcaccccggaatatccgccgtacatgcgccgaatagaacggctgtagtgagaacacccgcaacaagcccttttttcatcatcatttctcctcctatcatcatagtcagatagcgctatcaattcatattataaaaggttttgggaaaaattccataaaagatatacgggcggacgtaaattaaaactattttcctatttatcttgtaaatggagattatttgaactatgatatgttcagtcatacaacatgattcaggaaaggggataggatagaaatgaaaaagacggcagctgtgcttttgtctttcggcctggtgttcggttgttcatacggagcggggcagacggcagaagcgaaaacaaaggtaaaaacgtatcaaaactgtaaggcgctgaataaggtgtataagggcggcgtggccaaatcgtcgaaagtgaaaaacaagggcggcagaacaaagtacaagccgtatgtatcaaaagcgctttataatgcaaataaaagacttgaccgggataaagactatatcgcatgtgagaaataaaaaaacaagcctctctaaagaggcttgtttttttaaatggattcggcggtgacggcggttccgtatccgattaattcggatgtgttctgtcctgcggtcagttcgaaccgcaggccgacgatggcgttcgctccgagctgctccgcctctctgatcagccgctctttcaccgcttttttggagtcttccagcatttcggtatagcttttcaattcgccgccgacgacagattttaagcctgcaagcaaatcttttccgatgtgacgggactggacgatactgcttgtcaccaagccttttacttccgtaatctgttttccggcgacggtttcggtcgttgtcatgatcatgcggctttcccccttcatgtgtcttaccgctattttatcattaagccgccttttcggctgcgctgatttgtttttttctgactgcggcgctgacggcaaacatgacggcaatgttcagaaccagcgcgatgatgcctgtattcatatccttaatgatctgcggaagaaacggaaagagggttccgacggttgattcggtcagcgtaatgaaggccactgttccgaccccggccgttatgccggcaaaagcgccgtggcttgtgatgaaacgccgcttcggcaggctgaataagagggcggggaaaagctgggtgacaaggctgtagcccattaaaagcaaggtgacgatggtatttccgcctttcagcgtaaaatatacggaaatcagcgcgataacgggtacggcgtattttgcgagccgtgagactttttcgtcagtcgtgccgggcagaatggctttgtacacatttttggcgaacagcgtgcttgaggccattaatatcattgaaccgggtacaagcgccgtcaggatgcccgccgatccgatcagcccgacaaaccagggatcaaaggttttcacagacagctttaataaggcgagatccgtgtccgccccttttaaaccgggcacctgcagaatcgccgcaaatccggtaaagatgacaaacagcaggacgagctgataaagaggcatgatgatcgcgtttttccgaaacacccgcggatgctccgccgaataggaagcggcaaaggtatgaggccacatataaaagccgagggcggtcagcaaaaccgttgagctgaaccaggaaacgctctgtccggtttccggcagcgtgagaaaaccgggttttgcggcgtcaatttgtttgaacatctccgtaaacccgccgtaataatgaatgggcagataaatacctaaatacaggacgatgcctaaaatcatgatatctttgacgacggatatccacgctgaaccgtggattcctgaaatcatcacataaatcgtgatggagacagcgccgatccagacagcggcggagggcggaatctgtccgtatgacgttgctgaaacaattaatccgagccctttcagctgcaggacgagataggggatgagggatgcgatgccgacgagcgatacgagaatgccgaggagcgggctgttgtattttgaaatgaaaaaatctgattgcgacatcagtttgtgttgtttggcgtaagtccacacggctggcagaagccaatatgacaaaatgtaggcaaggcagccgtacgcgataatataaaaggcggggcctccttttccgtaagcccatccgcttccgccgaggaatgtaaaggtcgtgtatatttctcccgccattaataaaaagacaaacatcgtgccgaagccgcgtccgcccaccgtccattgttcaaggtccatatgttttccttttcgggcccggattccgagatatacacaaaacaggagcacggcggccattacgggaaatgctgcattcattccgtctcacccgccttgttttctttgtccaatttgtaaacggcggccatcagaacggaagtcagcaccgcccagatgacgacatatgcgagaatgaaaggcattccgaaaacataaggcgtcacccggttggcaaatggaatgccggcgagaattccgaaaaagggcagggcggcgagaacatgaatcagtttcataacattcctccttttcattgaaaacagcgtgtcccgattataaagaaaatcatgtcgaatgtatagtgtgaatagtctgaattttattttttgaaaaggaaaagcaggcccggctgctttttaaatggtcgcaagagacaggtaatattccaataaggcggtgacctgttcccgtattctcgggttgaaataacggtgtttttcttcatagccgttaatggtgcatatataaagcgtaaatgcttcgtctctttccgcttcgtatattttaattttacgctttcttaactcttttcgaacatcactcaaatccttttgtgctaattttaaagagcagctgataagctgtttatagggttgttttaatttgaacgggcacgaatcaagcgcttcgaggtcccggttcaggatggcggccgccatgggcagaaacagccctttttcgatgagatcgcgggtgccgctccgaatgtcaggcataaatactccttctttcttaaaaaagagaacgtttgttcttattttatactcgcttacacgatatttcaagacggaaaatctcgtaaacattttcgttttttggagataatgtgtagaataaggatagacaaactcgttaaggagtataaacgttggagcattttttatcatatttgactgaggaacagctgacggaatggttccaaagctatagagctttcggcccggcggctgcggctgtattgccttttattgaagcgtttcttccgtttttgccgctcgttgtatttgtggtggcgaatacgaatgcatttggtttgtgggaaggtttttttctgtcatggctcgggtctgcgtcaggatcgatgctgatgttttatgccgtccgccgtttcggacagaaaagagctttcggtttcatccgcaggcatcagaccataaggcggatgatgctctgggttgagcggcacggtttcggtccgctgtttattttactttgcttcccctttacgccgtccgctgcggttcatatcgttgccggtctgtcacgggtgggggcgctgcagtttatatcagcagccgcgatggggaaaatggttatgatctttatgatcagttttatcgggtatgatcttcacgcactcattacacagcctttcaggatggcgggcgccataatggtgatcgcggtgctgtggtatgccggaaagcatatcgaacggcgtttacagacgagaatcagtcagcatgagaaagacggagggagacaggaatcttgaaaaaacgattttggtttatagccggcgtgcttatcgttgttttggccatacaattaaagaatgccatttttattgattataaagtcgaaggaatcagcatgaatccgacctttaaacaaggaaatgagctgatggtcaacaagttttcccatcgttacaaaacgatccgccgtttcgatattgttctgtttaaaggcccgcaccgcaaagtgctgatcaaacgtgtcatcgggctccccggcgagtcaatcgcatacagggaggatcagctgtatgtgaatggaaaacgggtggcggaaccgtttttaaaaccgttaaagtcatcattgtccgccgggagccatgtgactggtgattatacgctgaaggaaacgaccgggcgcaaaagcataccgaagggacaatactttgttattggcgacaaccgcatatacagcctcgacagccgtcatttcggtccgattaaggataaagacattgtcggagtcatcagtgaatcagacgccaagtgaacggcgtctttttttcggaaatgattgtcaaaaagcggaggaaagactataatgaaaattgttacgcgcgaaacaaaaaaggaggtgttttatttttcatatttttgttacgcgcgcaacaaaaatatgaaagagggctgatgaaatgaaaacacaggctgccattatcgggggaggtccggtcgggcttatgcttgcatcagaactggcgctggccggagtgaaaacgactgtcattgaacgattgaagaagacgatgccgtattccaaagcgcttatcatgcatccgcgcacacttgagctttttgccatgagaggcatattggaacgcttcttggaaaaagggacgaaggtgtcttccggccatttttccatgctggatacacggctggatttttctcggctggatacgaagcagaattattcgttaatgctgccacaggcagaaacggagcggatgttggaggagtatgcatcaagtctcggcgcagacatcatccgcggggcggaagcggtggctgtcacccagacggatgacggagtggagacggtgttccgggacgaaagcggaatccgcactcttcacagcttatatgccgcgggtacagacggagcggggagcattgtccggaaacaggcgggcatcgctttttcgggcactgatgccgacttaacaggaaccctttgtgatgccgctttgaaacatccgcccgaatcttcctttttttcaacgtgccggctggagggatcggttgtgattatccctcttacggacggacttttccgtgtcctcatcgtttctccgcatgtcccgcaaaagcggaaggaagagcgggtcaccgaagatgagctgaaagaagacctgcggcggatatgcggcactgatttcggattgagtgatccggtatggatgtcgcggttcggcaatgccgagcgtcaggctgagcagtaccgctccggccggatttttgtggccggggatgcggcgcacattcattttcccgcaggcggccaaggcctgaatacggggcttcaggatgccgtcaatctcggctggaagctggcggcgcaaatgaagggaaaagcggcgcctcatcttctggacagctatcatcaggaaaggcacagcacaggaaaagaagtgctgcacaatatcaaaacgcagataaagctcatggattttaccgagtcggggatggcattaagagaaacgatgaccgctttgctggattttcaggagtccaaccgtttattggcgggaaaagtatccgcgcttgatctgcattatgaaccggatgcggagctgccgccgcataccctgaacggaaaacgcctgccggatatcgaactgacccttcatgacgggcggccggcccggctgtatgattttctccgcaagggcggctttgtgcttctgtcattaagagggagcattcccgccggtattgatacggacagcgtggcggcagtcagggcggagcttgctgaaacacgtgccgattggaatgacgtccacaccgttttaatccggccggacggccatgcggcatgggcagccggcggctcgggacgtgaagcggaagaagccgttctggccggtttggagagatggggattattcatctgataacctttttatgcgcctgtgtgattgtttcttatgtaacaaaacgttatagtaaaagaaacaatcaatacggaagggtgactcagcagttggacagaagacagccagaccatgcaaaacacatgattcttgaagggctgaccgatatttttcacgagcaggagaggtgtcaggaggatatcagggcgtcgttggccggacggatggatgaactccgcgaaggaaacgggaaaaaattacaattgaccttgacggaaattcacattttgtcgtgtatcggagatcatgaaccgatcaatgtcacgtcaatagcggaaaaaatgaagacgacaaagccgaccgtgtcgagaagctgcgcgaagtttttggaagccggctttctgcgcagaacccggctgagtgacaataaaaaagaagtctatttccggctgactcctgccgggaaagagctgcattcccttcatcatgaatatcatgaattgataaaacagcggctcttggcgtttttagaccgctatacagatgaagaactgttatttgctgaacggctgttccgtgatctgtcagcaaactggcggtctgtaaatggcggcggagagctgttcaaataaaaaacacgcatatggatgcgtgttttttattcggatcatgttcctctttctgcccggcctctttcgccgtgtgcccgtttcagctgagaaaggtggtgcagcagccgatagaagggcggaagcatggcgatgacgagaacgatccggatgacctgaaccgcgacgacgaaagtcgagtcttcgtgcagggtgatcgaagtcgccgccatctcggcgatcccgccgggagaaaaggcgagaacagatgtaatcatggagatgcccgttaatttagaaaccgcaaccgcgctcagaatcatggcggcgattaatccgacggaagaaataaatccgacggtcagcactctcgtcacaccggtgaacatgcttttgtacatttttgatccgattgtggcgccgagaaaaatttgtgacagctggttcgcttccggcggccaccaggccagcatgtctttgcccgccaaggcggacacgccgatttccgcagcagcaacgccgatcatgctgccgagcagccaaggggcggggaatttcagccgttttgcgcctttacttgcaagccaggcagctaaaataaatccggccgttaacaagacgggaataaggcccggatgtgaagctcctgctgaaacggctccggctgatgtctgagccgcaccgttttgtttggtaaataagaaaatgacgagaaacggtattgtcatgacgaccaaaaggacgcgcgtcagctgaataaggcttacaatcgcggtgtttgcgccgacttcctgggcgatacccggcatggcggataaaccgcccggcgccgttcctacaaagcttgtcatcatgtccgtccggctgaaccgaaagagcacatatccggaaacaagcgccatcacgatagagaaaatcagcatgaagcctaccggaagccaatgctcccgtaaaaccgacagaacggacaggttcaatttctggccgagttcgatgccgaggatcatttgtcccgccgcaagccatctgcggtgaatccctcttctgtcaggcgccatgaacagccagccgggcctcgtcatggagaggatgcagccggcggcaagcgttccgagcatccaggcgatcgacatccctgtaagcgaaagaagaaacccccctgccgcactgatgagaataaaccagatatccgtaaggagatgtttgtctttcttcaatgaaaacccttcttcctgaaacattcatattaaattgttaagctcgttaaccttactattactatagtatagattttgagataaataaataatgaattatttctcataatccattcatttttcttatcgaaaacataaaaaaagctccggagatgggtgagtgcaccctactccgaaacctcgcccgcttttcctttccacacaagcgtcaatcccagaccgagaaataaaaccacacctgcgaacagaaacgggaagtgaatattcatatcaaataaaataccgcccagagccgggccgaaaatggtgcccaaactcgtgtatgttgagttcataccggcaacaaacccctgctgatttcctgcgatcttcgatagataagtagtcagtgccgggcgcagtaaatcaaacgcaaggaaaatgatgcaggtgacagcgagcacgggcaaaaaccctgacatcaccgtagaaacgaaagccagcacagcgccgatgatcagacaaagctgaatgacttttttctccccgaggaagttgacaagtctgccgaacgcgagcacttgaatgaggactgccacaatggagctgaacgtaataataatggcgatatcctttggcgtgaagccgaatttatggtttgtaaataagctgaataccgtttcgtacgccgacagcccgaatgccaaaacaaaaacgatgataaaggcgatcaagtagcttggatgaatcgactttttcaaatcttttaagaaggttgattctttggcgctttccatctgctttgcgcgttcttctttagttaacggctctttcagcataaagacagaggaaatcactgcgataaatgcaattcccgccgcaaagaaaaacggcatacgaacgccgtgatcggcaataaatcctcctatgccgggcccgatgataaaccctgtgctgatggcggcagatacatagcccatcgccttcgatctttcctgcaccgtcgtaatatctgcgacatacgctgtaacggcgggcatgataaaagcggcactgatgccccccagcacccttgcgaaatataaaatggagacatgtgtgcccaatccgaaggtcagctcggataatgcgaacaaaaacagtccggcgagaatcatgatttttctgccgaaacggtcaacccatctccccgcaatgggagatgcaattaattgcgcgacggcgaaggcagcgacaaggtatcccattgtgctgcccgtcaagtgcatcacattcataaacagcggcataacgggaatgatcaatccgatgcctaaaaacgcaataaatatgttgcttaataagatgatgagtacagccttttgttctctgatcggtttttgcatgttgtttctcctttgtcagctgtcattcagtttatcagcgttgatcgacccgtgaataaacacggagatggcttctttttgcaattcgattctttgctgaatggtatcgtttttatataacacatctaaaccgtagaagacggatagcaggatttttacttttgattcgacatgatgaatggaccagcttccgtcttgatttccttcttctaagatctctctcatcacatcgtcatattcaatatcaattttgttgagccgctttacgacctcctctgacgtaaacgcactcgcataaaactcttcacttgctctcataagcgggtaattgatgctcatccggctgagcagctccgcaaagcccgtcagcttttcggcagcatctttcagatcagcttccatttccctccacgtctcgatcatcacgcggtgatcctcttccatgatatgaagaaacagaaactcttttcctttaaaatggtgataaagattgcctttactgatctcggccgcctctaaaatatcccgaatcgatgtttctgaatatcctttttttgcaaataagtcacgcgaagcggatacgagcctgttcttcgtcttttcgctctttccggcaccgccttttgtatttgtcacttcacacagatcctttccgcctcattcatatcgttgtcccggcaaagcggggctcggttcgtttaaaaccgaccagttggtttattttattataaagggtttttgctgactatacaatgaagaagttatccattgtttagtggaagtataaaaacggctcgaaaaataaaccccattctctcctgttgaaagaacggggtttgccgtctatgactcccagcggggagcgtctgaatcgttattttccggtatttacctcggtgtagcttgtgttcggcgagtttgataccgttccccctgtatggtggaaaggagagtgggccatatcgtataaaaaccagacggcatgacgctgctcgtcaaatgccgtgcgggcaaataaccgtttcgcttccggatgcaccgctctatcggatgcctgtaaataaaaatcattcgttttctgctcatcataaaacgccgccctcagtccttctctgtatgtgtgcggacaatgctccgtctgtttcggcgtcaactgttttccggtaattgacgtatacagtgaagagaaagcgtgcatgtggcgcacttcttcctctctgatatgttcgattcgtcttctgatttctgcggtcggcgctttttcggctaatattgagtagcaaatcacagcgctgtattcaccgtttatggattttaccagatcctttataagcacagaatcgtcactgcagatggctgtataatgaaaaaaattctcgtgcattggactcacccccggatgtttatagggtattatacggcggcagcccgtgacatgtgcggatgtcatttttattcttgatccagcggcgatgtaatatggtcgtcgtatgtgtcgacaaaaagccggccgttgcttccgcgcacagcgtatacgacgtcttccggtttgaggtttctcttatccaattcttctctcagccatttttccgatacgtggttttcttccagatttttcattaccagccggccgtccataatcagctcaacggcaaagttcttttcatgtccggcaaagatgccgagatcctgtcttgtaacgggcgcaaattccggtttgacctccactgacatgctgccgtttgtttcaatgatggcagtctgaacctgagaaatgtcaaatacatcattttcacgaagctgctggttcaagtagtcgagggtatagcgcatctttttcatattatgctcaagtatttttccgttttgaatgataatggtcggtttgcctgcaaagaaacccctggcagttctgtttttcatagaaagatatgcgacaagataaatgataaccacaaaaatcgtgtaagcactgacagtaaaatgaatcggcagttttgtattaaacgacagattggctgtgatggcgccgagcgagatggccgcaatgaaatcaaaaagcgtcatctgtgaaatggtttgttttccgagtatacgggcgccgataaacagaatgctgaacgacagaatcgttcgcacaatcacttcgggatattctgacatcatatttaatcctttttttctttaatttggtcaaaaacgatatgttttaaaacagtcatcccgtttttaccagcagatgagattggtcattttcgtcaactttcgataaaatgtagaaagataaaaagagagggtcttctaatttgggtgttgagtttttagtaggcagatcggggagtgggaaaacgaggctgattatcgacagcattcaagatgaactgcgccgggagccgttcgggaaaccgatcatttttctagtcccggatcaaatgacgtttttaatggaatatgagcttgctaaaacgccggatatcggaggcatgatacgcgctcaagtgttcagtttttcgcgtttggcgtggcgcgtgcttcagcataccgggggcatgaaccgtccgtttgtgacgacgacgggtgtgcagatgcttttaaggaaactgattgaagaacataagcacgattttaaagtgtatcaaaaagcgagtgacaaagccggattcactgagcaggtggaacggatgctgacagagtttaagcgatactgtattgagcctgaagacgtccgccgcatggcggaaagcggaacggcgtcagagtatcgcggagagcggatgctgtctgaaaaacttcatgacttaggcattttatatcagcagatggaaagaagcctcgccggacactatctgcattcggaggactatttgacgctgctcgctcagcagattcctttggcggacgttgtaaaaggcgcccgtgtttacgtcgacggattctatcaatttacgccgcaggaattaagggtgctggagcagctgatcatgcatgctgaacatgtcacattctcgctgacggcggacagcccttcggcggaacaggcaccggatgagctcgatctgttcagaatgacgggaagcacatactataagctttatcagacggcaaaggaattgaatgccgatatttcctgcaaggaactgcatggcacgaagcggcatcggcatgtgccggagcttgcctgtatagagtcgcagtacgatgtgcgtcccgccgccgcgtataccggcggacaggaagcttttaccgtcatgcaggcgcaaaacagaagagctgagctcgaaggtattgcccgggaaattcaatcgcttgtccgggacggaggataccggtacaaagatatggcgattctcatccgtcagccggaagattataaagatttgctgaaggaagtgtttgccgattacgggcttccttattttattgacggaaaagcttctatgcagcatcacccgcttattgaattcatccgttcaagcctggatgtcgtgaaggggaactggagatatgaagcggtgttccgctgtgcgaaaaccgaactgttattcccgcttgatcagccggagcagaaaataagagagcaggtagatcagcttgaaaattactgtatcgcctacggcattaaaggggagcgctggacgaacggcgagcggtttgtatacaggcgcttcgtatcgctcgatgaggatttcgcgcagacggatcaggaaatcgagatggaacacatgctgaatgagacgagagagtggatagctgcaccccttatccggctgcagaaccggatgaaaaaagcgaaaacggttcaaagcatggcggaggctctttatctctttttggaagataccgatgttcccctgaagctggaccggaaaaggcagcgggccgaagaggccggaaacatgatcgaagcgcagcagcacggccaggcgtgggatgccgttatccagcttctcgaggagtttgccggcatgatgggtgaagatgaaatatctttggcgctgttccagcaaatgcttgaaacgggaacggaatcgcttcatttttctttaattcctcctgcgcttgaccaagtatttgtagggaatatggatctctcaagaatatacggcacgtcctgcacattcgtcatcggggccaatgacggcgttcttccggcgcgcccggatgaaaacggcgtgctgtctgatgatgaccgggagtggctgaaagcggtcggagtggagctgtcttccgcggggcgtgagcggctgcttgatgagcattttctcatctatatggcgctgtcgagtccgtctgaccgtctttatgtgtcatacccgattgccgatgcggaaggaaaaacgctcctgccgtcaatcgttgtaaacaggcttggcgagctgtttcccgatcatcaggaaaagctgtcagcggctgatcccgagcaggtaagcgaagaagagcagcttcagtatctcgtcaataaacaggtggctcagacgtatacggcaagtcagctcaggctgtggacaagagagtacgagatcagtgacgtatggtggagcgcatacaatgtgctgatgaaagagtctgatcaccagcgtgcgaaaaagctgttttcaagcctatttttccgcaatgaggcgaagcgtcttgaacggcctgtttcgcgccagctttacggcgagcatattaaaggaagcgtttcccggatggaggcgtttaatgcctgccagttttctcattttgcatctcacgggctgcaattaaaagagcggcagtttttcaagctggaagcgccggatatcggccagctgtttcactccagtctgaagctgatttcagaccggcttcgtgagcagaagctggaatggcgcgatctgacgaaagatcagtgccggaatttctcctatgaagcggtggaacggcttgcgccaaagctgcaaaaagagattctgctcagctcaaacagacacttttacgtgaaggaaaaactgcagaagatcgtcacgcgtgtttctggcatattaagcgagcatgcgaaggcgagcggtttcgtcccggtcggtcttgaactcggtttcggcggaagcggaccgctgcctccgctcactttcacgctgaaaaacggctgtacgatggaactcgtcggacggatcgaccgcgtggataaagcggaaagttcaaaaggcctgctgctgagaatcgttgattataaatcaagcgacagggggcttgatctggctgaggtgtattacgggctcgctctgcaaatgctcacatatcttgacttatcgattacacattctgcggattggctcggcatgaaagcgaccccggcaggcgttttgtatttccatatccatgatccgatgattcaggccagtctgccgatggggcttgatgaaatcgagcaggaaattttcaagaaatttaaaatgaaaggccttctcctcggtgaccgggaggcgatcagcctgatggacacgactttggaggaagggcgttcaaatatcgtcaatgccggtttgaaaaaggacgggtctttaagatccgactcagcggcggtcagcgaacaggactttcatctgctgacagaccacgtgcggcggacatttgaacaggcgggcgaagcgataacggacgggcttgtgtccattaccccgtataagctgaaagataagacgccttgtacgtactgtgcgtttaaatcggtttgccagtttgatgagtcgcttaaggaaaatgaataccgcagcctgaaagcggaaaaagacggcaccatactggattggctgaaaaaggaggcggatgatgatgcaaattcctaaaccgaaagacagcatatggacggatgaccaatggagcgccatcgtttcttccggccgcgatattcttgtcgctgccgcagccggatcaggtaaaacggccgtgctcgtggaacggatgatcagaaagataaccgcggaggaagatcctgttgatgttgacaggctccttgtggtgacctttacaaacgcctcagcagcggagatgaagcatcggatcgctgaagcattagaaaaagagctcgccaaaaatccgggatctctgcatatcagacggcagctctctctattaaatcgggcgagcatttcgacgcttcactctttctgtctgcaagtgcttaaaaaatattattatatgattgatcttgaccccggttttcgcatggctgaccagacggaaggcgaattgctcggagacgaagtgcttgatgagctgtttgaagatgaatacgcaaaagggaatcaggcgttttttgagcttgcagacagatatacgacagacaggcatgatctggatcttcaagaccttgtcaaacgggtgtacgagtattcccggtcgcatcctgacccggaagcgtggctgcagagctttgtccgcttgtatgacgtgacggaagaaagcaaaatggaagagcttccgttttaccagtatgtgagagaagatgcggaaatggcgctcttcggggcaaaacaaaagcttgagaaggcgcttgaactgacaaaagcgcccggcgggccggccccgcgcgctggtaattttctggatgaccttcagcagatagaagagctgatcagctgccggcatgacttcgatgcgctgtatgaacgggtccccgcagtctcatttaagcgggcgaagccggtaaagggtgatgaatttgacaaagcgcttttggacgaagcgaccgatttgcgaaacggcgcgaagaaactgatcgaaaagttaaagaccgattactttacaagaagtccgcaagatcacttgaagagtttaacagatatgaagcctgtcatcgaaacgctcgttcagctcgtgatatcgtacggaaaacgatttgaagcggcgaaacaagaaaaatcaattattgatttctcagatttggaacattactgcctggcgattctaactgcggttgatgaagaaggccggcgggtgccgagcgaagcggccgtttattatcaagaccagtttcatgaagttctggttgatgaatatcaagataccaatcttgtgcaggagtctatcctgcagcttgtgaaaagcggggatgaagaggcgggaaatctgtttatggtaggcgacgttaaacaatcgatctaccgtttcagacttgctgagccgctgctgtttctcgggaaatataaaaggtttacagaaagcggggaaggcgcggggcagaaaattgacctgaaccaaaatttccgcagccgttccgatattttggacagtacgaatttcttgtttaagcagctgatgggcggaaaaatcggcgaagtggactacgatgaacaggcggcattgaagctcggcgcatcgtatccgccgaatgacgcggcaaaaacggaactgctgctgattgacagcgctgatgacgcagacagctccgaggatgccgaagactttgaaaccgtgcattgggaagcgaaagcgatagccggggagatccgaaagcttgtctcgtctccgtttaaggtctatgacgggaaaacaaaaacacaccggaatatccagtaccgggatatcgtgattttgctgcgctccatgccgtgggcgccgcaattaatggaagagctgaaaaaccagggcattccggtgtacgccaatttgacgtcgggttactttgaagccgtggaggtggctgcggcgctttcagtcttgaaggtgattgataatccgtatcaggatattccgcttgcttccgtgctgcgctcgcccatcgtcggctgtgacgaaaatgaacttgcgctgatacgccttgaaaagaaaaaagcgccgttttatgaagcgctgaaagcatatatagcgaacggtgacaggcatgatgaactgtatcaaaaactgagaaccttttatgacagtctgcaaaagtggcggtcattttcgacgaatcattcggtgtctgagctgatttgggaagtataccgcgataccggatattttgactatgcaggcggcatgcccggcggaaagcagcgccaggccaatctgcgcgtcttgtatgaccgggcgcgctcgtacgaagcgacggcgttccgcgggttattccgctttttgcggtttattgaacggatgcaggagcgcggcgatgatctggggaccgcccgtgcgctcagcgagcaggaggatgtcgttcggctgatgacgatccacagcagcaaaggacttgaatttcccgtcgttttcaccgctggactcggcagaagttttaatatgatggatctcaacaaatcatacctgcttgataaagagctcggtttcggcacgaagtatattcatccggaactcagaatcagctatccgactcttccgcttgtggcgatgaagaaaaagatgcgcagagagctcttatccgaagaattgcgcgtattgtatgtggcgctgaccagagcgaaggaaaagctgtttctcgtcggttcctgcaaaaaccgggaaaaacagctggccaaatggcaggcccaagcagaccgggctgattggcttctttctgaattcgaccgctatcaggcgtcatcttatttggactttatcgggccggcgctcatccgccaccgtgacatggaggcgcacaggacgccgggactttcttcgtctgaggatatcgcgcgcgacccgtcgcgttttcacatccggatgctgcagcaaagtgaattgctggaagagaatccaaaagaacgtgctgaagaaaagagcaaacgtctcaaggcgatacagcagggcgagccgattcctggttcgttttcatttgatgatcaggcgcgccgtctgcttaaatgggaatatccgtaccgagagctgacggctatcagaacgaagcagtcagtttctgagctgaagagaaagcaagagtacgaggatgaatacagcggccgctctctcatcaaaccgtcaggagacacgcttttatacaggcgtcccggttttatgatgaaaaaagggctgacagccgccgaaaaagggacggcgatgcatacggtgatgcagcacataccgctgacgcacattccgactgccgaagaagcagagcggacggtccggatgctttacgaaaaagagctgctgacagaagagcagcaggaagccattgatatagaagaaattgtccggtttttcggaactgaaatcggtaaagaccttctcggggcgctgcggattgaccgggaagtgccgttcagtatggcgcttccggccggcgaggtgtacaaggatgccgaaacggccggtgaaccgctgctcgtgcaagggattattgactgcctctacgaaactgcggacggtctctatttgctggactataaaacagatcggatagaggggaaattccggaatggatttgaaggcgcggctccgattctgcaaaaaagatatgaaacacaaatcgaattgtatacaaaagcggttgaacaaattacaaaaacgaaagtgaaagggcgtgcgctctatttcttcgatggaggtcacgttcttacactgtaacgagatccgaagctcctttttggagcggatctttttttctatcaaaaagtgaggtgaatgcggtatgcgcattttacatacagctgactggcacctcggcaaaacgctggaaggcagaagccggctgagcgagcaggccgaagtactggaagagctgaataccattgtcaaggaagaaaacattgatgcggtcattatggcgggggatgtattcgatacggtcaacccgcctgcgctcgctgaacaattgtattacgaaagtctttccgcgctttctgacggcggaaaacgcccggttgtcgtcattgccggaaaccatgacaatcccgacaggctggcggcggcttctccgttaacaaatgagcgcggcattcatttaatcggctatccgcggacagaacccgtccatattgaggtgccgtcggcggacgagctgttagccgtagccgcgctggcatatccgtcagaggcgagattaaacgaagtgctttctgatacgtttgaggaaaagcttcttcgcgatcattacgatgtgaaaatcagagaggcgtttgctcacatgtgcggactgtgccggaacgatgccgtgaaaatcgcggcgagccacatttatgtcgcggggggaaatcagaccgattcagagcgtccgattgaagtcgggggcgcctacacggtcgccgctgacagcctgccggctgatgcggcttacgtggctctcggccatctccaccgtccgcaaacgatcaagcgcgccaagacggctgcccgttattcaggctctccgctcgcatacagcttttcggaagccggttatgccaaatcggtgacagtggtagaagcgaagcccggcggagaagcgaagtgggaagagattttcctgtcttccggtaaaccgctcgtcaaatggaaagcgcaggggctgagcgaggttcacggctggcttgatgaagggcgtgaccggaatgcctggatcgatcttgatatccatttgacggatcagctttctctcgaggaaattcatcggctgagaaaggcgcatcccggctttatccatatcaggccggtttttgaagaaaaagagaccgaaaatgaccggattgaagtgaaacacacatcaattgaggatcgatttaagaagttttatgaaaaacaaacgggcggcggcgtgccggatgaggagatggtcaagctgtttttagagcttgcgtcagcagatgatgaggaggatgcgacatgaagccgattctgttaacgataaaagggctccacagcttcagggaggaacagaccattgattttgccggactgtcaggagccggggtgttcgggattttcgggccgaccggaagcggaaaatcgtcgatccttgatgccatgacactcgctttatacggaaaagtggagcgcgccgcaaataatacgcacggcattctgaatcatgccgaagatcagcttgccgtctcatttacattcgcgcttcaatccggccaccgggtttcctacaaggtcgagcgcgtttttaagagaacggatgaaacgaaagtaaaaaccgccctctgccggctgattgaaatcaaagacgaacaaacggtgctggccgataaagcgaatgaagtgaacaaaaaggtagaggagcttcttggcctgaccattgacgactttacaagagccgtcgtgctgccgcaaggaaagtttgccgagtttctgtcgcttaaaggcgcggaaagaagacatatgctccagcgtctgtttaatctggaacagtacggggacaggcttgtcaaaaaattgcggcggcgggcgcaggaagcggcagcgaaaaaaaatgaaatgctggccgaacaatccggcctcggagacgcaggagaagatgcgctgaagcaggctgaacagcagtttcacgaagcgaacgaacggcttgaagcagctgagaagaaacgggtccgggcaaaagagcgttttgaaaatcaccaggaaatttggaacttgcagacagaaagagatgaatatgagcgccgggagaaaaagcttgaggaaagacgcccgtacatcacggatttgactgagcgtcttaaagaggcggaaacagctctcgcccttgagccgtacgcagaccgctgcaccgaagccgtccgccggaagcagcgagccgaacaggaacacgaactggccaaacggaaatcagaggcggaaaccgtttcatttacccggcaaaatgaagcctatgaagcatggcgcgcccataaggccgaacaggagccgaaacttgtcaaggaagaagagctgtatcaaagactttcagccattgaacaaaaactgcttgaagcgaaaaaagaagcggaaaaaacaaatgcggagcacagcaaaaaagaggaagaatacgaagccgcctcgaaacagctggccgcagtgaaagaccgcctgacccgcggccaaaacaggcagaatgagctgaaagaagagctgaaagcagttcaagtgaccgcagatgaacggaaaaaatgccagaccgcagcacagctggcggcaggctttcagcagacacaggaacaaatcacgaaagagcgggccaatctgacaacgcagctgaaaaacgtggagaagctcaacggagaaagcgagtcgctcacagcgaaagcgaaaacggaagaggaagacattacgcgcgcttatcaaacgctgcaaaccgtttaccatatggtctgtgaaacggaacgttcactgaaagccgcagccgaacgggctgaaaaaacgcaagccgatctccgcaggcgctcagaggaagcgagaacggctgcattaacaaaagaattatcggaaaaactgatcgaaggaaagccttgtcctgtatgcggctcgacgcagcatgaccgcccgcgttccgctcatgaaacattctcgcctgataccgctgtgcaggaacatttgcagcaggtggaagcactgctttctgaggcggcggctctttctcaggaagtgctgacagccaaggttgcattagaagaacagtcggggcgttttaccgaagaatgtccgtttctgcaaagcgcccgggttccggagctggaagccgcttcttccatcagcggacgcccgcttgatgaagcgttcagcgccgtccgcttggaatggaaacaaatgaaacaggatatgctgtcggtaaaagagaaggtcgcaagactgatcagcgcgcatcagcagacggtaaaacaagctgagcagcttgccgaacgaatccgctacgaggaaaaagaagccgaccgtctcagacattcattagaagagcttgaatcgctgtcagaaagccgattgaatcagtacaacgaagtctgcggtcatattccgccaaaccggattgacgcctggcaggcttcgatagatgagaaggacaggcaggcagaagaatgtgagaagcgcattgaaacaagcatcgcattcctcaaggaacatgaagaggagaaagaacgcctgcaggagatgaagcatcggcttgaacgggaacggctcgagcttcactatgcgtctgagcgcctgcagcaggtgattgacggatatgaacaagagctcggaacagcagctgaagaaacatcaatttccgcaaagcttgaagcggtgcggcaggaattacagctgttaaaatcaaaagaacagtccctattcgatgcgctgaagcaggcgcagcaatcgctgaatgacgcaaaaggccgggaatcagggagtctcatgtcactcagggatgctgaggcctctcttgagaaagcgcaaaacgactggcgcgtgaggtcaaaagacaccgggtttaccgaaccggaccaagttaaaaaaagtctgcttccgcaagggcgtgcagaggaaatgaaaaaagaaattgatgagtttctggacacctcaaaacagctatcggcaaatatcagccgtgttactgataaattagccgagcgccggatatcggaggaagaatggacagcatccgtttctctgctgaagcaggcagaggctgagtcaggcgccgccatggaggaaaaaggagcacaggcaaaagccttcgcggttatgcaaaaacagcataagcgctttaaagagattgaagccgaactgaaaaactggcagacacagattgacaggcttgataagctccagtctgtatgtaaaggcaatacattcgtcgaatttttagcggaagaacagctggaaagcgtggctcgggacgcctctgcccgtctcggagcgctgacaaggcagcggtatgccatattagtcgattcagaaggcggtttcgtcatgcgtgatgacgcgaacggaggcgtcaaacggcccgtatcaagcctttccggcggggagacgtttctgacatcgctgtcgcttgcgctggccttgtccgcccagattcagctgcgggggcaatacccgctgcaattctttttcttagatgaaggattcgggactcttgaccaagggctcttagacaccgttgtcacagcgctcgaaaagctgcaatcggacaacttatccgtcggagtgatcagccatgtgcaggagctgagagcgcgtctgccgaaaaaattaatcgttcatccgtccgaaccgggcgggaaaggcacccgggtcacattggagatcatgtagaaaggagaaggaattatggccgattctgccgagggtacatgtgaattatgcggccgccattatgtgcggctgacggagcaccacttaacgcctaaggaagaaggcgggacattccttccgaccgcaatgctctgcatcccttgtcataaacaggttcacgcgctctatacgaatcaggagcttgcggcaaggctcgcgggaatagaagagctgcggcgtgacccgaaactcgcgcggtttgtgaaatggatcagaaaacagccgccggaaaagcttgtaaaaacaaaaaaagcaaatgaacgaaaataacgctgaaccaaaagcagccctcttctgaaagagcggctgctttttaggcgtttccgaccacattttgatcgctgacatcggggtctatatagtttgtcgcattgacaacgttgtttaataacaggaaatctccggtattgcctgctcccgaaccgagcgcagatttagaagagctttttggagaaaggtaaaaggaatcaccaaagtttacgactccgcccgatatggaattgatagctataggtccggtaattgctggcataaacgacaccctttatagaagtctcaccgtcattatatgtcagggctgctgtgattgtgagcttggcgtgaagatctgcctaatatgtttcagccgcgaatctcccagaacgaccgacgtcgatccgatttgaaccacggacgctgacgataccccttgaactttcacattccttacccgaattgaaggattttcatggcagaatgcgctttggactcccgtttccggtaacggcatgacggccggctgccgaaagatctggtattcttttttgttaaatgagccttcatcatctctgtatacagcaagactgcgctgatcggccaatactttgatccgcatattgatttcattcgtatcgcctgcttgaaagacactcgcaatcccgactgaattgattttggcgttccggaggcgtgaaatgcgctttaacattattccggcgccagcggcacataaggcccgataataagagattccggaggcgtgtcaaagatggaagacagatagacggaatcggtgtcgccgattaataataaggaagaactggatacaccagtagaccggatgtcgccgacttcaatattccggttaatcactgtaaaaatcatgacggatcatcacctttcatttcaccaggtatgtgtttaataaagtgctcgacggccctgacaatatcacgcttcacatgttcggcaatctgctcggcatattgcgcgggcgccgtattttcttctttcgggacatgggacagataatactgaatccggctgtccatctgctttctgatatcttcaataatatgatatttgttcgtttcgtccagcctgctctcatactgagtttcgagctgctctaaaagcgcggggatttcttcattcaggtacatatcgacgttttgacggatttgctgcatttgctggcccgcctgttcctgctgcatcattccgacctgcggagatgtctggccgacttcgaagttttgcacggcattcggatcagtcggattcaatccgatattcagcgttccttccagccgttcaattttcagctgatcaaatttatactcgagccgatcgattcttgtagaaggctgctgcttcagcgttgaaatttcattttggaattctttcagctgccgttcgagctcctgaatctgctgcgcctgctgctggacgaaagaatttaaattctgcaggtaggatgaaacggattgatcatacatgacattcacctcgcgtctcgtttccttcattaaaactaccggcttggcggctggagcggtacaaatgatgaggtgccgggacctccccctgttgttacagcctgctgccccgcggtgacaggcggcgccggctcaacataactccctgtgttgtacagattggaaagagatttaattgaaccggcgcttccgatttgcagtatggaggaattgctgacagattctacacgcatgtaattgatatggatcgactgattgacgtaaaaattcatacggcgcctcctttatgcgtttcctgccatcggctgatcgattacatcattatcgtacacattcgttgaattcctgtaattcgtcagtgtgagattgtctccggtattgaagctgcccgctccggcaaatgtcttaacctctgcttttggagaaatggtgatgcagtcgcctatatgaacgactccgctcgtaccgacggcattaattttaaacgctccgacaattgcgggcatacgagcacatccttttcgtgaagattttcatgactgcactccaggagcttatctgggctgcctgcctaaaatagcttatgacaaatgcacatttttgtgagcggaaaaaactttagacgtaaaaaacaccggcgctttacagatgccgggtcttatacataaatgatacagatttatatacatatcacgtttatgagaaagcctcttttctttcgcggccgtgctgaatctgtgcggccgggttcggcccgctgtctttcgtttgttggatgagcccgccccggcacccgtttaaaaggctgtccagctcctggctgcacctgatggtctccgtcgcattgattccgaatttttgcgctgtctcgaataaagttaatcttttttcttcaattttgttcatcgtgtgatctccaattctcgattattttggaaaacataggatgataatagtataacccattttggccaagaaggttttatttcgtcaatatgactaaaaaagtgacaatttttgatactcttttacacttattttcagcctgtttaaaagagggatttcccgcccggaggaagaatacataaaggaatgccatttaaaaatgatgggggattaacatgaaatttgcaacaggggaactgaacagccgaaaatttgtcggtctgattattgatgatgacaaaatcttagatctgcaaaaggctgaaaaaaaattgtttgaacttgagacgattccgggttcgctgatcgagtgcattcaaaaaggagataagttcgtcgcgcatgccggacagcttgcggaatgggcgaaaaaaccgaatgacgagtcgggttcatttatgtatgcgctgtctgacgtaaagctttgcgcgcctattccgagaccttcaaagaacgtgatctgcatcgggaaaaattatcgtgatcatgccgttgaaatggggagtgaggcggatataccggagcatcccatggtttttacgaaagccccggctgccgttacaggccacggagaaacagtgaacagccacttggatgtaacggagcagcttgattatgaaggggagcttgcggtaatcatatcaaaaagcggatcgcacatctccaaagaacatgcgcttgatcatatattcggctatacaattgtaaatgatatcacagcgcgcgatctgcagaaaaaacataaacagttttttatcggcaaaagcctcgatacgacatgtccgatgggcccggtcattgtacataagtcggccgtcagtgatccgcaaagcctgaaagttgaaacgcgggtgaacggagaactgcgccaatcaggatcaacgggtgacatgatttttccgatagctgaattaattgagacgctgtcaaaagggatgacgcttgaagccggtgacattatagcgacgggaacgccgtccggtgtcggaaaagggtttaagccgccgaaatttttaaagccgggggaccgcattgacattacaattgaaccgatcggcacgctgtcgaaccaaatcggataattgtgtgtctttcgcacgattgataatgctccgagcggcttgttgtggtaccataaatgaggcagattgatctgatagggggaattgaacataatgacacattggcatattacttcatgggtcgttgcgcttatcctggtgtttgtcagctacgggctgtacggtgccggaaaagcgaagggcgcaaaaattacgcatatgattctgcgcttattctacattattattattctgaccggagctgagctttttgtccgttttgcgaattggaacggagagtacgcaggaaaaatgctgctcggcatcattaccatcggactgatggaaatgctcgtcatccgcaagaaaaaaggcaaatcaaccggcggactgtggatcggttttattatcgtgctcgtcctgacggtgctgctgggccttcacttgccgatcggttttcacgtattttaatcaatcgcttgaaaaacccggatgcatccgggttttttttagttgcgcaactgggccgctgaatgagaaatgccgtgttgatgaggcgaaagagatgtccaggatgccaaaagcgtcaatcactcttgttgccgcaaaagctacggctgtgaagggtaaaagcaaacgccggccgtcaatcagcgtgaaaaacaaagctgaatacatcaggcggcacctatttaaaaggtgccgcctgtttgttacgcggtgccgtcttgtcttgccgctgaatacataatggagcgccgcccgtcagatgccgtccattcaaatctgtcgtgtttacccgagctgccgcggtgatgctgcagggcgcattgtgcgtcatccgccgagaagtgataaaacgaaacgccttcaccggaaaacagcgcctgattataggaaaatacgcaatcatatacagacaggccgaacccgtgcagatggctgagaaacagcagaaacgtttcatcgtccagcgaatcgagcaaggttaacagcggccgtttgaccgccttttcataacggatttcttccccgccgagcagggggatggtgtctgcgccgatttcggccgaaccgccgcaaatccgtgccggctgccatctgccgtcgcgtttcatcaatacgtctgcgtttccgagactgtctgcaagcaggatatcgccttcatcgttttcgacgaggcagatgccgtcctctatcatcagtgtgccgcgcccccatttgtttttttctgagaaaagctgttttcgtttcataaccgtgcccgtctcctttgtttgtttcttctcttccgttctttccaaatcgggcttgtctcatacaactcttagtgggacaaatcaactatctgcgtttctttgcataaactgggtaaagtgctgatagaaacgaatttgaaaccgacagaaacgggattggagctgatatcacatgtgtggaattgcgggttgggtcgattttcaaaagcagctcgtccaagagaaacatattatgaacaatatgatagacactctttcaaaacgagggcctgatgattcaaacgtctggggagagccccatgttttattcggacataaaagactttcggtcgttgacattgaaggcggccgccagccgatggcctgcacgcatcaagaggaaacgtacaccatcatttataatggcgagctgtataacacggaggaattgcggaaggagcttcaggcgaggggccaccgttttgagaggacctctgatacagaagtgctgctgcacagctatattgagtggcgggaggagtgcgtggaccgcttgaacggtattttcgcttttgccatctgggatgaaaagcgaaagcggctcttcggggcaagagaccggctcggcgtcaagccgtttttttataaagaacacggctcttcctttctgtttgggtcggaattgaaagccattcttgctcatcctgatgtgaaagcccgcacagacagcggcggacttgcggaagtattcggactcgggccgtccagaactccgggctgcggggtgtttaaaggaattcacgaggtgcgtcccgcccatgcgttcactttctcaaaggacggtttgtccatatggcgttattggaatgtaaagagcgaaaagcatacagacagcttcgatgaaaccgccgctcacattcggtacttatttcaggatgcagtgacacgccagctcgtatctgacgtgccggtttgcacgtttttatcaggggggcttgattcgagcgcgataaccgcgatagccgccgctcattttgagaaacaaggaagagatccccttcatacttattcaattgattatgaggagaacagcaaattttttaaagcgagcgcctttcagccgaatgatgacggcccgtggatcgataaaatgacaaatgcattcggcacacagcatcataagtgcgtgattacgcaggatcagctggttgaacatctggaggaatccgttctcgtcagagacctgccgggcatggctgatgttgattcatcgctattatggttctgccgggaaattaaaaaagattttgtcgtgagcctttccggagaatgcgcggacgaaattttcggcggatatccgtggtttcacaccgcggcagaagaagacggatttccttggatgaggtcgactgaggagagggtcacgctcttggatgaaaagtggcaaaaacggctgaatcttagagaatacgtgaatgcgagatatgaagaaaccattgcggaaacgccgctgttagacggtgagacgggaacagataaagcgagacggcagctgttctacttaaatatgctttggtttatgaccaatctgctcgaccgcaaagaccgcatgagcatgggcgcaagtcttgaagtacgggtgccgttcgccgaccacagacttgtggaatacgtttggaatattccttgggaaatgaaaatgcatggcagccgggaaaaaggcattttgcggaaagcgcttgaaggactgcttcctgaagatattttgtaccgcaaaaaaagcccttatccgaaaacgcatcacccgaaatacacgcagggggtcacagaatggctgaaaacgattttacaacagaaagattccgtgcttcacaccctgcttgacagaaagaagctggaaatgctgctggagacagaaggttcatcttttcaggtgccgtggttcggccagctgatgaaaggcccgcagctgatcgcccatcttgcccagatccatacatggtttgaggcgtaccgtatcgatatagaagaataacagtgccgcgaccggtttccgctgaaggatatcggtctttttattgtgaaacatatggtacactaaaaaacagaggagtgataccatgaccgaatacgaaacatgcgcccatcttgccgaggtgcactttcctttatataaacggactttctcatccctgccgccaaaaaacaggcgggccgcatgggcggtgcttgctttgtttcacgaagctgatcggcttgatatgcaggaacttgggggatttgaacaggcggcacaagactttctgaacggggcacgcgccgacggctttttgtgggaggcgctcactgatgtgcggcagcaatttgcacttgaagaagagccgttgcgtgagtttatcgccggccacatctctgacagagaaaaagtaacgtatcaagagtttgatgacctgctgatgtacgcgggccaaacaggcggagccctcggcctgcttctgctgccggtttgcgcgcgccggaaccaagagaaactccgccatgcagccgtttcattaggagcagccattcagctgacccgggtgcttctgagggtccatacggatgagtggtcgaaaaagcgtctcccgcgccaggtgatgatgcaattcggctatacggaagaagagctggagagccataccgtcaacaaagcttttatgaatgtatgggagtacatcgcattcgaggccgaggcgtatttcgaggaggcgtctgaagagctggagctgtttccgttatactcaagacccgccgttaccggtttgctggcacattaccggtcagagctcggtgacatgagaaaacggctttcgcaggcataaaaaaacgcccggcttcttaacgaagctcggggcgtttatgcaatccctttttgaatccaaatccgcgaccgccatcttctgtacataagaatgcctctgacccattcatccgcgataaatgaaatccagatgcccataagccccaatccgaaatggatgccgaacagataagcgagaggcagtccgataccccacatggaaatcatcgccatgtagacggggaattttgcatctccggcagcccgcagcgagttgatgataatgacattaaatgaacggccgggctcaagaatgatcgtcatggcgatcagcatgctcgccgtcgcaataatgtcagggctgcttgtgaaaattccgatcagctgctttgaaaacaaggtcatgatcacggatgtcaaagcggcaatgccaagcgcccagtacagacttttcatgcagcggtcataagcgtcgtcaaaccgtttggcgccgatatatctgccgatcaaaatctgtgtgccctggctgatcgccgttccgaacagcaggataaacatggtgatgttttgtgtataaacctttgttgtaagcgcctgagcgcccataatggcgataaaataagtgacaaccatttgtgaaatgttataagacagctgttcgccggcagacggaatcccgattttcaggagtttccgcaagtgctctttatggacgtgaaaaatcttttgccatgtcagaccgagtccgatgcgttttttgacgatcacaatcatcgcgatgagcccgatgatccgcgcaaaggacgttgacatcgcaacaccggcgacgcctaacaccggaaggccgagcggcccgaaaatgacaagaaagtttccgccaatatttaaaatattcatcccgatcgtaacgaacatcgtatccttcgtatgaccgtagctttttaaaatggcgctgaacgtcataatcaaagcctgaatgaaggacagcccgccgaccacctgcaaaaagactttggcatccggcatcaattcattggaaagacccatcacatgaagcagcggaacggccgcaaaaaatatggcggcgctgatggcgagactgatgacaaagttcgctcctattgatacataagccacttcctgcgcctcttttttctgtttagatcctaaaaactgtgaaatcacaattgtcgtacccgttgcgataaagctgaacatcacgataattaaatttaaaatctgattgctgacacccacggccgccacactgttgtcagagtattggctaagcataagagtgtcggcgtttcccataaacatatataatgaaacctcaataaatatcggccaagtcagcgcgtataatgagagtttgtgatcagaggattgtttgaatgcagcccgttttaaaatcgcttgtttcatttcttttaacccctttcctgaaaaaatcaacgtttaaaagtgtacctccattttcttataataaaaagggagagaaacgaaacttcttgcaaaaatccgacttaaaaaggagggccggaaatatgtcctttctcgagttcacagtccctccgttcccggtctttatcgctgcgggagaaggagtgttcaaaaaaggcgaaacccatgtgagacgggtcttcccggtgtttgatctgctgtatgtgaaagaaggcgtcctctacattacagaagacgaaaacgccttttccgttgaagcgggagaatatattctgctttctcccgggcttgaacattacggaacaaaaggcagtgaagaaacgacatcctattcgtggcttcattttgaaggagcggattatgaggtgacggaaaccaccgggaacaactggtcggagctgaggcgaaaaaaagggagctttgaagagccgtcccgctaccgcttgtccctgccgcaaaaagggaaggtgagacgcccgcagtttatggccgggcaattcagtgtgctgacagatgaaagcgccgagaactccgacctgccgctcagaaagcagattctgtttgaagagctgctgctccatcttcagaaagaagcgttccaaatcccgtccgcaaaggaaagagtcgcatgggaggccgcccggtacctgcaggagcactatcaggagaaaacaaccatcaaagcgctctcttcggcacttcattacaaccaagactacgtgacccgctgcatgcagcaggtgctcggcgtcacgcccggccagtatacgaacaaagtcagaatgacggaggcgaaacgtcttttgtccgcaaccaatgacaaaatgggggcgatcgcggacgccatcggcatggaggacccaacctatttttccaaactgtttaaacagattgaaggcatttcgccgcttgaataccgcaaattcgtaagccggaaaacggactgacctaataccagagaacagaagagggatcggtaagcatgaaaatgacaatttacgacgtggccgaaaaagcgggcgtctccatctcgaccgtctcgcgggtcatcaacaatacggggaggatcagtgacaaaacccgccggatggtgctccgtgtcatggaggagatggactatcatccgaatgttcacgcatccgctttgacgggcaaaaagacgaatatgatcggcctgatcaccccggacatttcaaacccgtttttcggggaactggcgaaaagcattgaagacagcgccggtgtacttgggtttcatatcattatctgcagcaccgattatcagcctgaaaaagaaacgaagtatttttcgatgctgcggcagaagcaggcggacggcattatattcgcgacgggacttgatcatgatgacagcgtcacggcgcttgatgatattgtgaaatcgggcatcccgcttgcgatgattacgcaggataaaccgctcgcgccgatggacgtcgtcattatcgatgactttctcggcggctatacggcggctgagcatctcatatctttaggccatgaaagaatcgcctgtatcgtcggaaacggttcgaccacgggtgaaagagacagaatcaaaggttttcaaaaagcgctgcgggaagcggggatgacactagatgaatcgctgatcataccgacggaatattcgctggaaagcggaaaacaggcagcgggcgagctgtttgacagagaccttccgaccgccgttttcgcctttaatgatgtcttgtcatgtgcggcgatacaggcggcgcgctcccggggcattcgggtgccggaagacttgtccgtcatcggctttgacaataccattctcgctgaaatgacggcaccgccgctcacgacgatttctcagccgatccgcgaaatggggcggcgtgtcgttgaacttctcattgatgagattcaagggaagaaaaaaacaaaaagcaaaatcattttatctccggaactcgtcatcaggcattctacggcaccggtaaaaacgcgccctcagcgataaggcgcgtttttttctgtgaaaaacattgtcaaacgagcgaaaagcattgtaaaattaaaacagcttttgagaaagcgcttgcgcaaatactgcggattgcaagcaaagaaagcaaacagcttgagttgtaaataaagcgctttcaaaataatgatttctgtttaataagagaaaccgcttgcgccattacggcatgcggcctcaagaaaaaaggagcggtgatagatgacagatcaagtcaggtgtgcggtgctgggattaggacgattagggtattttcatgcgaagcatttagccggcgaagtgcggggagccgagcttgcggccgtctgtgacccgatgaaggggaaggcggaagcgtgtgcgaaagaattaggaatcgccaaatggacggagaatccgtatgaactgctggaagatctcacgattgacgccgtcatcattgtcacgccgacaagcacacatgcggaaatgatcatgaaggcggctgaaaacggcaagcacatctttgttgaaaagccgctcaccctgagtcttgaggaatcgataaaagtcatgaaaaaaatcgaagaaacggacgtcatctgccaggtcggttttatgaggcggtttgatccggcatacgccgacgcgaaaagaagaatcgacgccggggaaatcggcagacccatttattataaaggatttacaagagatcaaggcgcaccgcccgcggaatttatcaaacatagcggagggcttttcattgactgctcgattcatgattacgacatcgcgagatatctcatgaatgccgaggttacgtctgtcagcgggcacgggaggattttaaagcacccgttcatggaggagtgcggcgatgtcgatcaggcattaacatatcttgagtttgattcgggcgcggccggcgatgtggaggcaagccgaaattctccgtacggccatgacatccgcgcggaaattatcgggacggagggaagcattttagtcggcacgctgcggaaaagccatgtcaccattttaacggagtcaggcagcagctacgaaattattccggattttcaagcccgctttaaagacgcttaccgtctggagcttgagcactttgccgaatgtgtgaaaaaaggggaaacgccgattgtgacagacatcgatgccgcgattaacttaaaaatcgggatcgccgcgacggaatcttttaaaaccggaaggcctgtaaagcttaccccgggcgcccccggctatgccggattatgatagattcgaagtaaaaaagcaaaggcccggcatgcctttgcttttttataattcatatgagaaaaaaatgtagtcagtcggcacgcctttatagcccatttggtgaagcatcgcgcttatattgccgcgatggtatgtgccgtgattcacaatatgccggatcacatcggcatatgtcgtccgaagcgttcccatgcgcggatgagaaatggagatcgggccttccatgttctccgattctcttaaaaattcgctgtattctttgtccagttcagtcattctatgttcaatcgcctcaaaatctccgtcaagcttttcaaattgatcaaactgcgagacgatttgttcgtaagtttctctgtaaagcacgtgaagccaagtgtaatcagcccggcatatatgcacaagcacggcgttcaaagtcggaaaaacactatccagttcctgctgtaagcttgccgcgggcagggtcttcagatgctgaataacttgctcattggcccatctatggtagtgatacagctttaaaatgtctgacattccaattccccctcttccttccggtacattcaacatgacctggccgaattccttttatcgaaacaaaagcgccgcaaaataaaaagcagcaccccacatcaccaatgccgagcattgattcaggatgccggggagccggccgcctgtatccgcggtttcgtttaataaaaaatcacgtcacgatggcgccgagcgcttctgcgaatgtaacggcatgagacggagagatgcggcatcctttcagcttatcaagcgagacgtgcagatgatcaaatgtgcacgtgctgatatccatattaaaaagagacgtgccgatgaagtttgcgccgttcaaatcacagacgtcaagatctgtgtattcaagaacagcatcattccactcactttctgaaaggccgcacgagtcaaaacggacatgcttcatattggaatagctgaaggagctgtaatttgcgaggcagtcttcaaaccgtacatgacgcatggcggaatccgccagattcaagccgagaagttttgaatgctgaaacgccgttctatggatgatgcttccgctgaaatcagcgtttgagacatcgcatttgtcaaacaggacatccgtacattccatatgtctgaaagagacatccgtaaaaacggtgtttctgaaaatgactttttcggcgcgcaggccgtccagtttgccgtttacgatgccgttttcaatgatgacttctttgagctcctcatcctgaagcgcttcagtgaaagaaagcaccggcaattctttcgggattttcggtttttggatcgtattcatctcatactcccttttctaaacataatagctgaaatcggcaattggcagatatcgttttcgcccctgcccacccttgccgaattgcgtgttgtttactgaacaaaggttaatatcaaagcgggatcgcgtcaatagcggcgcttataaaagcttcattccgtttgaacgtcatccggcacgccgaaagataacaaaacaaagcccttataagagatgccacgggcttttgcctgtttcaggcgagttctttatacatgatcacatgcgggccgatgccgggtatgtcaaaggggctgcccgtgcttttccagccgagcttttcgtaatatcccttcacgtgacatctggcgttgcaccagacaagcgccgcccccatatctgccagttttcgttccgcataggcgattaacgtgcttcccgctttttgcgtccggtattcttcaagcgttgccatgccgcgcagctggtaggcgggcgccgcctgtaaagcctgctggttctgcgggtagaaagaagcgatgctgatcaatgtcccgtcgtaaaaacctccgagatgaaatgctcctttgacgctgtcctgatcatatttacaatcctcaatcgtctgatgggggcgcagcacgctgtgtctgatcgcgtatgtgtcttctgcggtgatgggttttacttcaaccatgaaaaaatcctcctttgcttgattctttttctgtatcgtaccatgaaaaagccgcctgtcgtatcaggcggcatcttccgcgtcaatgcaaatatacatcagcccgcttttcatccttttgcttaatataagctgcaagttctgatgtcaaatcagaacggagaaacggggtgattaaataaattccgttaaacagttcgcacgccgtgtcgagaagcgacttggcgatggcgaggccttcggctttctgcttttgcttgtcttcgccggcgagcgccattttttcccggatgctgtctgacagcttaatgcccgggatttcatgatgaataaactctgcgttgcggctgctcgttaacggcataattccgatatacaccggtgttttgagatgtttcgtttcatgatgaatgtcaatgagctgctgctccgagtagacaggctgggacacgaagtagtcagctccgcactcgatttttttctccagccgttttaccgctttatcaagatggcggacattcggattaaatgctccggctacggaaaagttcgttttcttgccgagcggtttccctgataaagaaatgccttcgttgaattgtttaatcagcctgatcaagtcaaaggacgttaaatcatagacggaggtagcccccggaaagtcgccgatttttgaaggatcgcccgtgatggctaaaatgtcggtaagcccgagcgtatccagccccattaaatgtgactgaaggccgatgatgttgcggtctctgcatgtaatgtgaacgagagaacggatatcaaggcgttctttcagcaatgaaccgcaggcggcattgctgatccgcggtgtcgccaatgaattgtcggcgagcgtcagcgcttctatgccggtttcttttaattcagccgccgcttgcagaaatttgtcaaaattcaattttttcggcggatcaagctctacgataattgaccgtttttgagcggcgatttcgtttaaacccggctcggtccgttcattccggacggagatgacttcttcttcccgtctgattttcacttctttatcagtgacgggggaaagtccgcggaccgcttcagccatggctctgatatggtttggcgtcgtaccgcagcagccgccgataatgcgcgcgccctgagtgcggaactgtacggcgctctcccggaaataggcatcgtccgtatcataaacaagccggccttcttctaaagacgggaggctgctgttcggatagaccgataaataagtgtcacggaatatcggcacttcggtgagcgcttcaatcatgtggtacgggccgagccggcaattgattcccgttatgtcagcgccgagatcggcaattgacctgagggcttcccgaagcggcgttccgtcctgcagcacgccctgttcgtgcatggatacattcagcataatcggaagttccgtttcttttctcgctatcttcagcacttcgcgcgcctcttctaaatcatagtatgtttccaggagcagaccgtccggctcttcgtgaagcaataaataaagctgctcccgaaagctgcgtttaatctcctccaggctgtaggcgtttttgttaaatgtgcggatgccgcccatcgttcccaatacataagcgccgtctgaggaagcgcgcgcgattctgaccgcctcctgattgatttttttcgtttcatcctcaagtccgtatcttgagagcttaataaaattcgcgccgtacgtatttgtctggatgatgtctgccccggcttccacgtaagccttatgtatccgcttgatttcctcgggctttgatacgttcagttcctcaaaacatctgtcaatgccgtaggaatagaggagagtgcccatcgcgccgtctccgattaaaatccgttcttttaagtcttgtaatagtcccattgtttgcctccttcgtcacattcagcaaggaaaaaagagaaataaaaaaagtcttcttaagaagaagactctgtaatcatttgtctctcttcttatcttccaagctgtttttagcttgctggatttagcaccttggtcatggtttgggttaaaccattacaccggttgctgaagcgtcgtcgggccagtccctcggcttctcttgataagaacgttcatgtaattgtcatgggtttccaaaacttaactgtgaaaatccctttctccaaatttaccgaaaatagagacaataatcaataggaatcacataatttatctaaaattaataaattgaacgtcaatcggcaggtctgccccgcggacggctgcaataatctgctgcagatcatctttattttttccggtgacgcgcacttggtcgtcctgaatctgcgactttaccttcaagccggagtttttaatcaccgcgttgatttttttggcgctgtctttatcaatgccctgtacaagcttcgcgcgctggcgcaccgtgccccctgaggcattttcgattttgccgtattcaatgttttttgtcggcacgtcccgtttgatcagcttgccgctcagcacatctttgagctgattcagtttaaactcgtcatcagaaatcaggacaagttcttccttttctaaagttacatcgcttttagatcctttaaagtcatagcgcgtgccgatttctttcagcgtcatctgaatcgcattctgcacttcgggaaattcaactttggatacaatatcaaaagaactttcttttgccatgagaaaacctcctataacatttcacttatgagttgattatagtagaataaagagaaatgtccaactgcataaagcatgaatttatgcatattggaaaaaatgagaaaaacatcagccccatacgggcgaatcaggaaggacgataacatgagaccagggcagcagctcacgcttagtatagatcaccaaaccgatttcggttattttttaaccgacggcgaggatacggttcttttacataacagtgaaattacagaggatattgaagacagagatgaagtggacgtatttatttacgtcgatcatcaggaaagactcgcggcgacgatgaaaaagccgctcatcagcttttatgactacggatgggtggaagtgacggacgctgtggaggatatgggcgtattcgtcgacgtcggtctgtcaaaagacgcgctcgtcgcaacggagcacctgcctccgtacaaatccgtctggccgcaaaaaggcgacagactgtattgcatgctgaaggtgacaagccgcggacgcatgtttgccaagccggcgcctgaggatatcatcagtgaattatttacggatgcagaggaagacgtcatgaataaagacctgacaggcacggtgtacagactgatcgcatcaggctcttttctgattaccgatgaaggcatccgcgcgtttattcacccttcagaaagaaaagaagagccgagactcggcagccgcgtgacggggcgtgtcatcgaggtgaaggaagacggctccgtcaacatgtccctgctgccgagaaagcaggatgcgctttcggttgacgcggaggagattctgacctatctgagatcaagaaacggcgcgatgccttacggagacaaaagcgatcctgacgatatccgcgaacggtttcatttaagcaaagccgcctttaagcgggcgctcgggcacctgatgaaaaacggcaaagtgtatcagaaagacggctggacatacgaaaaacaataaattttctgcaaaaacatcggtgaaccaaaaccggtgttttttattttctcaaaagctcctatgccctcatttgtttatcaacctgccgaacatacatattttattgaaataaaatattctgacatccgaaccgatatataactatagaaaaaaacaaaaggagagtttcaatgagaaaaatggcgatatttgcggctgtactgctgcttgcgctcagcacggcgggatgtgccggcaaatccgagggggcggcggctgaaaaaacgaaaacaatcggcatcatgctgacagacaacggcctcggcgaccaatcatttaatgattcaggctttcaaggtttgatgaaagcaagagacgagctcggcatcacatttgattacagagaaataaaagacaccggtacgtacgaaaaaggactgacccagcttgtccgggaaggcaatgatcttgttgtggggctcggttacagcatgcaggcggatttagaaaaggtcgccaaaaaatatccgaagcagcggtttgtgctgattgattctgtatcagacctggataatgtcacctccgtcacgtttaaagaggatgaaggaggcttcttagccggagcgctcgcggctatgacgagcaaaaccggcacgatcggatttatcggcggttcagatgccgacgtcattaaacggtttaagaaaggctacctgaaaggcgcggaatcagtcaaaccgaacatccgcgtgctgtcggaaatcagcggtacgtttgatgatgataagctcgggaagcgcatcgcccaaaacatgatccgaagaaaagccgatgtcctgtttacggcggccggcttcacgggtgtcggcgcactgaaagaagcggaggcgcgaaaagtatacgccatcggtgttgacagcgatcaatattacaccgccgagcacgccgttatctcttctttagtgaaaaacgtcgaccatgtcatctatgaattggcgaaagatttaaaagacaacaaggagatcaaaagcggtgagatcgtttacggactgaaggaaaacggcatggacttagccaagatcagagttgtcaaaaacgcaggcgggctgacgaaaaagatcacggatatgaaaaacagtctgattgaaaaaggaggcgatctgaagtgacattacggacaaggctgctcgttaacgcagccgttacgatgatttgcttcgccgccgtcatcggctttaccatcgtaaacatgatgaagattcaggcttcaaatgaagatgaagtggacgcgctgttaaacgtccaggaagcaaaagccgaccttaatacgttaaaagaaagcatcaccggctattcctatacgctcgcagacgcccagaaagaagatgtacaaagctatatgaaaagcagctcggataaactggcggcgctcaaaaaaacgatgacggacgatgcggacaaagccgctaagcatgcggcaggcatcagtatgatggcgcagaccgtttccgacattgcgggccagaccaatctgctgtccttaaacgccgcaatcgaggcggccagagcaggcgaggccggaaaaggatttgccgtcgttgccgaggagatacggaagctcgcagacggatcagccaaagcgaccgcgcagattttcgatatggtaaagcaaattgaagacggcatcacatctattaccggagctgtcacgaccggcgtcgctttagcggacagacagcaggagctgatggagaaaacgtcagaatcattcgcccatattgaacaaaaagccgcccatattaaggcggagcttactcaattggacggacggatcatcgaatcgaaacagcttggtgagcaagtgctgcatcatgccgaaagcatcagcgccgtcgttcaggaaacggctgcaggaagcgaagagatttctgcctccgcgcttgagcagctgtcttcttttcataaaatggcggaaagcgtcaataatctggtgagcctgacagagcggttaaacgatcaggtccgccggtttactttgtaacagacatccgtgcgcaaaaaacagccctctttctcctaagacaagagggctgttttgcttttacagatggtccggttttttggaattctggttttttcccgcctgccggtttttttcggcaagccggttctttttctggtttacggcgttattgtccaacggttttttgtcatcatctttcatgcggcaaagcctcccttctgtccgttaggatgcccgcccgcattgaaattatggcttcaggaaaaaaatcgcgagcgtgcccggcccggagtgggcgccgatcgcagagccgattgaatgaagaatgatttctttcggatggaacgcttcttcaatcatttccttcatcccaatcgccgtctcttcattatctgcatagctgattcccacggtttgatccgcccaatcgccgccttcttccttcatcatttctataatccgtttaaacagtttcttctgtccgcgcaatttttcgagcggcacgagcctgccgtcatccacatgcagaatcggtttgatgttcaaaagccccccgacaaaagcggacgtttttgaaattctgccgccccgtgcgagataggcgacgtcatcgaccgtaaatatatgtttcatccgtgcgcaaaagttctttacagacgtttcgatttcttgtattgtattcccgttaacacagagtgtttgcgcgtgcatcaccgcgaggccgcagcccaatgaagcgcatttggaatctacaatccgtaaatcaaaatcgggaaattcctcttttacttcattggcgatcattacggccgtctgataggtgccggaaagacctgaggaaaaggcgatgtatatcgccggttctcccagttccgcgtattgtaaaaatactttttttatcgtatccggtgatgcctgggatgttttcggaactttcccttcccgcatcgcttgaaagatatgatccgcctgaatggtgaccgcgtcctcatattcgtttccgtcaagtgttacgtgcagcggaatgaacccgatccggttttcttcaatataagatttcggcaggtcagaggcgctgtcagcaataaggtgaactgtcatcataattcccttctttccggttggtgagagtgatgccaactatatcatataaatttggcaaaatagtgttcaaaactttattttaagggaaaagctaataatgaaaatgagcggaggagcaagccatggtactagaacaagtaaaaaaattagcaatcgtcgtcatcggcgcgtttctgtatgcggcgggactgaatttattcctgataccggcaaatgtatattccagcggttttaccggtgtcgcccagctgctgtcaagcgtcgttgatcaatacgcccccttttatatttcgacaggagttctcatgttcctcttaaacattcccatcggtgtgttagggtggctgaaagtcggcagatcattcaccgtatacagcatattaagcgtagcgctgacgtccgtctttatggggattctcccggaaatgagactgtcacacgatattcttctgaataccgtattcggaggagtcatctcagctatcggcatcggtttaacgctgaaattcggcgcttcgacaggcggtcttgatatcgtgtcgatggtgctggccaaatggaaggataaaccggtcggcacatatttcttcattttgaacgggattatcattttgacggcaggattattgcaaggatgggagaaagcattatatacccttgtcgctctgtatgtcacaacaagggtgattgacgccattcacacgcgccacatgaaactgaccgccatgatcgttacaaaaaaagctgatgaaatcaaagaagcgatttacgggaaaatggtccgaggcattacgacggtgccggcaaaaggcgcttacacaaacgaacagaaagaaatgatgatcatcgtcatcacgcggtacgaattgtatgaccttgagaaaatcgtgaaagaagtcgacccgaaagccttcacaaacatcgtgcaaacgacggggatctttggtttcttcagaaaagactgataggagcggatagaatgaagtggctgtttggcctgttattaccggtcattttattgatcggatgcagcagtcaatccgggcagaaggagcccgctgaggaggtatccggagagatgaatgaacagcaagcggaattagccgtaaatcctgtgcagacagatcagcagatcgaatttcaaatgtctttaaaaaacaaaagcgaaagcccgatcgatttcacattcagctcagggcagaaattcgaactgaccgtacatgaccaacatcacaaagaactgtaccgctattcaaaagacaaaatgtttacccaggcgtttcagaccgtgaccttaatgccgaatgaaacgtatgacttttcagatgtgtggaagaacgtgcccggtccgggaacatacacggtgacggtgacgtttttagggaagtccgatcagatcggaaaaagactgaaaacggtaaaaacatttgaagtaatataaaaaagcggcgccctcatctaaacggggcgcctttttttattgcaatttctccagctgatcctgaaattggtgcagctgctgacgttctgcatccgtcgaattggcgtacgcggaagacacggcatttttggcgcgtgagacagctttttcctggtcgccgtcctcgaaaccgttagcaatcatgacggcctgctggacaaatgacttggcttgagaaaacagttcgtttctcattaaaagtcaacctgcctttcagccgaatcttttgctgcatcatgctgtgcttcctctaatgtagaccgatatggaaatcttgcgtcatgaagactgacagagtccttgccttgctgaataaaccgttttgatttgtttcgtttacccattgcaatgtcccccttccatatttagacgagatgagtcgtctgttttagtatgggcggaaggctttgtgttatgagcgggaaaacctcacagggagaaataggattttaaaaattcggcgattccgtccgcttcatttgaacccgtgacgcgatcggcggcctgtttgacttcatccgtgccgtttcccatcgctacgccgcacccggcaaatcggagcatttcaagatcgttgtcttcgtcgccgaacgcgatgatccgttctctcggcacttggtaatagtcgctgattttcttcaggccgaccgctttattcatcccgtgtttaataatttcaatcacatgccaaggagccgcccatcttctgtggtcaatgacctcggcgtgcacatcggataaatgcgcgcgtatgtccgcgacgtcctcttccttcgcgtgaatcaatacggacgtcacatcctcttggaccgtttcgcgcagatcgccgaatgtgacattcgccgtattcatatgaaacgcctcaattaaatgctcatcatgataatggaagtacacatcatcaatgatctcagcgagcacattatgtatttggtaggtctctgtaagttcggcaagctgtctgaccacatcgacagataaagacgtgtggtatcgtccccatgactcgtctttcgggtggtggacaaacgctccgttaaaattgacaatcggcgttgtcagcccaagctcgtcataatacatcgaactggaacggaaagggcggccggttgagatgcagacatgatggcccgcttctttcagcgtctgaatcgtccgtgccgtttcaggggaaatggttttatcatcttttaataaggttccatccagatctaaggcgatgaggtaaggttttgtctccataaataactccttttgtcatataatttgctgtttttctcttatgtacagtgtagctttttaccatctttattgtctacatgttacacttatgattatggttatcctaaggagggagtcaacgtgattcttattgatcatcaaaccgtatcaggcattccgtttttacatattgtaaaagaagaaaatcgggaccgtcccgctccccttgttttctttattcacggttttacaagcgcgaaggagcataatcttcatttcgcttacctgcttgctgaaaagggtttcagagccgtgctgccggaagctctttaccacggtgaacgcgctgaacagctgtcagcagaagagctcgccgtccatttttgggacattgtcttaaatgaaatcgaggagcttgacgtgctgaaaaaggattttgaagggcgcggtctgattgaagacgggcggatcggtcttgcggggacgtcaatgggcggaattacgacattcggcgcgatggctgcgtatgattgggtcaaagccggcgtcagtctgatgggaagtccgaactatacggcattttttcagcagcagattgaccacattcaaaagaaggacatcgacattgacgtcacaaaagaacaggtcgatgaactgtttgcgcggctcaaaccgttcgatctcagtctggaaccggaaaaactccgcagccgcccgctgctgttctggcacggcgttcaagacaaagtcgttccgtatgcaccgacccgcggcttttatgaaacgattaaacctcattacagcagccggcccgaccatcttcagtttctgaaagacgaacgggctgatcataaagtcccgagatacgccgttttagaaaccgtcgcctggttcgataagcatttataaagcacaaaggtgttaacaaaagccgcttttgcgttatactgaggaaaaaggagtgatggaacgtggaagaagcattaaaagaaaacatcatgggcgccttggagcaggttgttgaccctgagctcggcgtcgatatcgtcaatctcggccttgtatacgacgttgatatggatgacgacggcctgacgcacgttacgatgacactgacatcaatggggtgcccgctcgctccgatcatcgtcgacgaggtgaaaaaagcgctcgccgacattccggatgtaaaagagacggaggtccacatcgtctggaatccgccgtggacaagagacaaaatgtcacgctacgcaaaaatcgcattagggattcagtaataagaaaatgcaccccggattttaggtacatcctaaagtttggaggtgcttttcttttgtctgcatataagcgacagtgagggcttgttttggattgcaaacaaacctttatatataaaatttcatatgaggtttatcttttttgtaataggacagtctgtcttggagtgtacctgtgcggaattcaaatttatgtccatcgggatcagtaaaataaattgacttttgatcttgcttatccctaggacgcccatttaatatatttacatttagattttttaacctttgaagtattgcatcaaaatcttttgggtcaattgtaaaggccgtatgcgtataggatttatgtatttcatttcttggtatatccgcctctaagttaagtgcaagccaaagcccgttcagatcaaaatatgctgttttttgccctttaaccagaagttgtgcatgaaatactttctcataaaattctatagatttttccaaatctgaaacagaaaaaagaagatgattgatcccttttatgttcattttccccacctcatttaacatctttgttttaaacaatccctttggtaatacatctgcatatatatcgattatatactgactaaaaaatcatttttagggatttctgtgtattttttatgcctggtgttttccggatgaccgttttgaactgtactaaacatgattctgccggacgcgtctgctttgtcgctgcagaccggcgtgcggaaagaagggcaagtcactaaaaaaaacaagtttcccgccattcggggttttttgcggtatcgggttaaaaaggaaaaaaacggacggaggcatgatataatagaccggctgcatgcgagggaggaacccatgaagaaaaaattacttctcattatccttagcattcttgtttatacggcgctgttcgctgtttccgcctttcacaaagagccggagcggcaggcagggacaatgacggatgtaagccgtctcatgcccgtgaaaattaagcagacggtcaaaggaaaagagaaagaaacattggtcgaaacgattaaggaagcaaagagaaagcatttgaagatctcaatcgcaggcgcccagcactcaatgggcggccagacgtattatgaagacggcatcgttctcgacatgacgggctacaacaaaatactcggtctcgaccgaaagaaaaaaatcatcagagtgcaggcgggagcgacgtggaatgatattcagcgctatgtcaatccgtacgggctcgcggtaaaagtcatgcaatcgcaaaacatttttacgatcgggggctcactgagcgccaacgcccacggccgggatatccggtacggttcgctgattgatacggtcaaatcgtttcatcttttaaaggcggacggcaaagtcatcaccgttactccgaaagatgacctgttttcagccgtcatcggcggctacggcctgttcggcgtcatccttgacgcggatattgagctgacggatgatgagctttatgaaatgaaaacgaaacgcatgaacgctgatacatacagtcaatattttacgcagcatgttcagcgcaaccccgccgtgcgcatgcatctcgcgcggatcgcaacaggggataaaggctttttgcacgatatgtatgtgactgattacacactctcagacaaccagaaagaattaaagcggcacaatgaactgaaagaagatgagcatccggcgctgacgaaattcgcgctcggcctctcccgccggtatgactggggaagaaattggttctggtcaacccagcagtcttattttctcagtcaaaacggcgtgaaagtctccaggaacaatgtcatgcggtcagaatcgaaatttttggaatatgaaaacacggacaacaccgacgtgcttcaagaatacttcgtgcccgtcggcgaatttgcaccgtacattcatgatttacgcaagacgctgtcacatgaagatctcaatctcgtaaatattacgatccgctacgtgcaaaaaaatgaaaaagccgatctgtcatacgcaaaggaagacatgttttcactcgttcttttaatcaatgaagggttttcaaaagacagccaggcgagtgcagcgcggattgtcagaaaaatgacggatacggcgttgcgccaccgcggcagctattatctgccgtatatgctgtatcaaacgaaagagcagatgcgcgaggcatatccgaaaagcgatatgttctttcagaaaaaacacaaatatgatcccgatgacttgtttatgaattatttttatcagaggtacaaatcatgaaacacaaccatttaaaatggctgatcctgtctcagagcagtgtcttttttgccggcagcctgatctttccgttttatattttatttattaaaaacatcggttccagctacactcaattcggtctatcatacggcttgttcggcctgagcggcgcattgattcatccgctgctcggccggctgtcggcaagactggatccccgctggttcctgatggcgaattcgtgggggatggcggtgcttcttctgacgctcccgcacattaccggcgtgcaccaggtttatgtggtgcaggtgcttttgggcctgttcggcgccatgcaaaaacacggcgagaaaatcatgatcgccgattacactgacggcggggagcgggggaaaaaagtcggcagctatcatttctggacggccgtattttcagctgccgccattattctcggcgggtttctcgctgatttcttcacggtttatattattttttacgccagctccgtgctgttttttataagcgggctgatgatgctgaaaaaaacaggctgatccgatcagcctgtttttcttatgaaaccccctcgatcgagagggggtttttgtcagcgaaaaccgatggaaaatgaatgaaaaaatattaaatatacaattgaattaatttttattcatgttataatgttaaataatttcacaaaaaccaagaaggtgaacccgttgaaaataggtattataggcgcgactggttatggaggcgccgaacttgtcaggattcttaaccatcacccttatgcagaagattgtatattatattcatcgagcgacgaaggaaaagaatatgccgcttcatatccgcatttgaggaatatagcgtcacaatcacttcagccgcttcatatagaaacgattcgaaacgaaattgatgtcatgtttatagccgcgccgcccggcgtttccggagagtggtcgcccaagctggcggaggcgggcatcccggtcattgatctatccggcgatctgcggattcaaaacccggccgtgtatgaaaagtggtataagcggaaggccgcgccgaaaggaacgattcaaagcgcggtttacggtttagccgaactgcaaaaagaagagattcagactgctaagctgattgccaatccgggatgttttccgacggctgtgctgctcgggctcgccccgctggcgaagaataagcttttacaagattcttttctgattgttgatgcgaaaacaggcgtatccggtgccggccgaaaagcatccatgggcactcattattctgagctgaatgataattttaaaatttataaggttaatgagcatcagcatactccggaaattgaacagcaattagcggcttggcagcccggcacaggtccgatcacgttttccgcacatttggcgccgatgacaaggggcattatggcgacgatatatacggaggctccccctggtatgtctgctgcacaggtaagagaattgtattccgaattctacaaagattcatattttgtcagaatcaggccggaaggtgaatttccggcgacgaaagaggtatacggcagcaatttttgtgatatcagtgtcaccgtggatgaaagaacaaaccgtgccaccatcgtttctgtcatagataatctgatgaaaggcgccgcagggcaggcggttcaaaatttaaatatcatgaatggctggcaggaagaaacgggacttacgatgacgccagtctatccatagaacgaaagagggattcgaaaatatgattcagctgagtgaggaaatcacgaaagtaaaaggcggcgtatcttcgccgaaagggtttgaggcaaagggcgtgcactgcggtctgcgctattcaaaaaaagatctcggagcgattatcagcgaagcgcctgcagtcagtgcggcggtatatacgcaaagccattttcaggcagcgcccttgaaagtgacgcaagagagcttaaaaaaagaggccgtgcttcaggcggttatcgtcaacagcgcgattgccaacgcctgtacgggagaccaaggattaaaggacgcctatgaaatgcgggacggcttcgcgagccagctcggcattgagccggagcttgttgcggtttcgtcaaccggggtgatcggcgagcttttagacatgaaaaaaattcaggcgggcattgaacagctcggtcaagcgccgtcagtgtccggagcatttgaagaagccattttgacgacggatacagtgacgaaacagacgtgttatgaactggtgatcggcggaaacatcatcacgatcggcggagcggcgaaaggctccggcatgatccaccccaacatggcgacaatgctcggctttgtcacaacggacgcggccgtggaagaacagtcgctcaaaaatgcgctcagagagattacggatgtttcatttaaccaaatcaccgttgacggagaaacatcgacgaatgacatggtgcttgtgatggcgaacggctgcgcggggaatgattgcctgacggagcagcaccctgactggccggcatttaaaaaggggttaaagcttgtatgcgaagaccttgccaaagatattgccagagacggtgaaggagcgacgaaattaattgaagccagagtcgaaggcgcgaaaaataaccttgaggcgaatattatcgccaaaaaaatcgtcggctcaagccttgtgaagaccgccgtttacggcacagacgccaactgggggcgcatcatcggcgccatcgggcacagtgcggcaagcgtaacggccgaacaagtggaagttttcctcggcggtcagtgtctgtttaaacacaacgaacctcagccgttttcggaaactgatgccaaggagtacttatcaggtgatgaaattacgattgcagtccgcctgcaggaaggctccggcagcggccgggcatggggctgtgacttaacctatgattatatcaaaatcaatgcgagctatcgcacatagcaaaggggagcggcatgaagaaaaccatcgtttttaagtgcggcggcagtgtaatccgcgagttatccgccgatttttttcaaaatgtaaaagagcttatgcaatcgggctggaaccttgccgtcgtgcatggaggaggcccggacatttcaagaatgctgaaaacattgcagattgaaacggaatttgtcgatggacagcggaaaacgaccaaaccggtgctggaaacagcggaaatggtcttgtcagggacgatcaataaatttttcgtaaccgaactcgcgaaaaacgggctgaaagccgcgggaatatcaggaaaggacggcggtctccttcaagcgtcttaccttaatcaagacaaatacggagaagtcggcgaaatacaaaaaaccgatccgtcaatcatccacgcattaatgaaagaaggcatcattcccgttatcgctccgctttccatgacaagtgatttcgaaacgctgaacgtcaacgcagacgccgcggcatcggccgtcgcttcagccttacacgccgataaacttttatttgtcacggatgtcgaaggaattatggacggagagaacaggctggatactttgacgccgcaagaaattcaggccctcatcgatgacggcgtaatttcaggggggatgattccgaaggtaaactcggcattatcggcactgagtgaagatgtcgaggaagtgatgatcgtaaacggaaaaggagcgtttttcaccaatcaagtcttccaaggaacaaaaatcgttaaagaaaaggagagcgtgtcatgagcagcctatttcaaacctacagccgctggcctatcgatattaaaaaagcgaaagggacaatcgcagaggatgaaaacggaaaaacgtatctcgattttattcagggcatcgccgtttccaatctcggccattgtcatgatgcggtgacggaagcggtgaaagaacagcttggcagcgtatggcacgtttccaatctgtttgaaaatgatcttcaggaaaaagccgcggcaaagcttgccggacatagcgcgggggatctcgttttcttctgcaacagcggagccgaagcgaatgaaggcgccattaagcttgcccgtaaagcaacgggaaagacaaaaatcgtaacatttcatcaatcctttcacggacggacctatgcggggatggccgccaccggacaagacaaaatcaagaccggtttcggaccgatgctccaaggctttcactatcttccgtttaatgacccgtcggcattcagcacactttcaaaagaggatgatatcgccgccgtcatgcttgagacggtgcagggagaagggggagtcaatcccgccgatccggaattcatcgaagccttacagacattttgcaaagacaaacaggcgctgcttatcgcagacgagattcaaaccggaatcggccggacgggcaaggcattcggctatgagcacttcggcatctctccggacatcatcactgctgcgaaagggcttggaaacggttttcccgtcggagccgtgatcggcaaaaagaagcttgccgacgcctttacgccgggtacgcatggtacgactttcggcggtaataagctcgccatggcagctgtgaaagcaactttggacattgtgtttcagccggactttctccaggcggcggcagacaaaggctcttttttaaaagcgcagctgaaccgtgaactgacagggccttttgtaaaagaaatccgcggaaaagggttattaatcggcattgaatgcgcaggtcccgtgtccggcatcatcggagatctgcaggaacgcgggcttctcgtgcttccggccggaccgaatgtcatcaggctgcttccgccgcttacggtttctgaagaagaaatgctgtcggccgtcagtatgctgaaagcagcgatcgaagcgcattcggcagtgaaacggtaatttttttcgatataaaggtataaaaattcatatttttaattaattattcatcaagaggtgggctttagatgaaaggctatttagtattggaagacggaacatcattcggcggtgaacttgaaaaagaggcttgctgtgttggcgaagctgtttttttcaccggaatgacgggctatcaggaagtgcttacagacccgtcatataaggggcagatcatcgtctttacgtatccgctgatcggaaactacggaattaatgaaaaagaccttgaaagtaaaattccacaagtcaaggctgttgccgtctatgaagcgtgtgaacatttttctcaccatgaagcagtctcaagcttgagagagtatttaaataaatggaacatcccgctcttaaccgaagtggacacacgggccgtcgtcaaagccatccgctccggcggcacgatgaacgctgctgtgtcaacagcaggagaaattcccgcagcatccggaacacaaaatccggcggagctggcgcagtctgaagacatcacttcaatggggaacggagaccggcatattgcgctgattgatttcggttataaaaaatcaatcgcctcgtcacttgtaaagcgcggctgtaaagtaacggtcattccgtatcagcagatggatgccgtttatgacattcagcctgacggaatcgtgctctcaaacggcccgggcgacccgaaagcgattgcgccgtacatgaaccggattacatctttactcagtgatttccctgcactcggcatttgcctcgggcatcagctgattgccctggctttcggaggaaatacgtataagctgccgttcggccacaggggtgccaaccatcccgtcattgaccggaaaacgaaaagggtgtttatgacaagccagaaccacagctatgtcgtcgatgaagcgtcaattgacgaaaacgagctgtccatcagatttcaccatgtcaatgatacatcagtggaagggctcattcataagcgccttcccgtattaagcgtccagttccaccctgaagctcatcccggtccggctgagagcgagtggatatttgatgaatttctagagaaagtgataccagcaaggagagaaatcgctcatgcctaaagatacaaccatttccagcatattagtcatcggctccggccccatcatcatcggccaggcggctgaatttgattattcaggaacgcagggctgcatggctctgaaagaagaaggataccgcgttattctagtcaataacaacccggcaacgattatgacggatgaggcgtttgccgatgaaatatattttgaaccgctcacaaccgacagcatcgaggccattattgaaaaagaaaagcccgacggtctgcttgccaatttgggcggccagacggcattgaatttagccgttaaacttgaagaagcaggcgtgctgaagaagcatcacgtcaagctcttaggaacatcggtggaaaccattcaaaaaggcgaagaccgggagcagttccgcgccctgatgaaagagctcgaccagcccgttccggaaagcgaaatcgtcgacaacgaagaagacgccctccgcttcgctgagtctatcggatttccggttattctgagaccggcgtacacattaggcggaaagggaggcggaatcgcgaaaacgaaagaatcgtttcagacgcttattaaacaggcgctgttagcaagcccgatcagccaatgcctcgtcgaaaaaagcatcgccggatttaaagaaatcgaatatgaggtcatgcgcgacagcaatcatacatgcatcaccgtctgcaatatggaaaacatcgatcccgtcggcgtgcatacaggagactctatcgtcgtcgcaccgtcccagacgttaacggatgaagaatatcagatgctgcgttccgcaagcctggcgattatttcggcgctggatgtggtcggcggctgcaacattcaatttgcgctggatccgttcagcaaacagtactatgtcattgaagtgaacccgcgtgtcagccgttcatcggccctcgcgtcaaaagcgaccggctacccgattgccaaaatggcggcgaaacttgccgtcggctatacgctcgacgaactgaaaaatccgctgacgggctctacttatgcaagctttgaaccggcgcttgattatgtcatcgtcaaattcccgcgctggccgtttgataaatttaaacatgccgaccgcacgctcggaacgaagatgaaagcgacgggagaggtcatggcgatcgaaagaaatatggaagcggccattcaaaaagcggcggcctcccttgagctgaaaacgatcggcacccgcctgcctgaactcggcggctgtacgatcaatcagctgtgggaattagcggtaacgccggatgaccggagatttttcgtcgtcatggaactgttaagccgcggtgaaacgatagaagatatccatgccaaaacgaaaattgacccgttttttctccatgtattccgaaatatcatcacattagaaaacaagctgatggaagaaggggatcatctgtctgtcccgcttttaaagcaggcgaaggtaaaaggcttcacggatgtcatgatcgcatctctcacgggaaaaacggaagaagacatccgtgctctcagaaagaaatcaggcatcgtcccgtcgtttaaaatcgtagatacatgcgccgctgaatttgatgccaagacgaattatttctactccacctaccttggggaaagcgacggagatgtcagccgaaaagagaaaaaacgcgctctcatcatcggctcaggcccgatccgcatcggtcagggagtggaatttgattacagcgccgtccacggcgttctgaccctgcaaaagctgggatatgaaacgattatgatcaataacaatccggaaacagtaagcacggattatgaaatcgccgaccggctttattttgaaccgctgacgacagaacatattttaaacgtggcggaacatgaaaacattgattttgccatcgtccagtttgggggacagaccgcgatcaatgccgctgaaccgctggaaaaagcgggcattccgctgctcggaacatcctttgaaacccttgatgcgctggaggatcgggatctgttttatcagctgcttgatgatcttgacctcaaacatgccaaaggcgaaacggcttattcaaaagaagaagcaactgaaaaagcaagccgaatcggctaccccgtgctgatccgtccgtcttatgtcatcgggggatgggcatgatcatcgttcattcagaagcgcaaatgtcagagctcctggaaaaagaagcgggcatgccgtacccgattttgatcgatcagtacattacaggaaaagaattggagatcgatctgatttccgacggacatgaagtattcgtgccgacttacacagagcacattgaacgggccggcgtccattcgggcgacagttttgcgattcttccgggtccgtctgtcacacctgatatgcagcggaatataaaagaggccgccgaaaaaatcgcggtaaaactggcttttaaaggcattatgaacattcagtttgtcattgatgacaaaggggatattctcgttcttgaagtgaatccccgggcaagccgcacggttcctgtcgtgtctaaggtgatgggggtgccgatgatcccgcttgccgccagattgctggccggcgcttcccttaaagacatcaagcccgaggttcaaaatcagcacggaacggcagtgaaattcccggttttttcttctcacgccattcaggatgtggacgtaaagcccgggccggaaatgaagtcgaccggagaaggcatgtgtgtcgcgtttgacgcagaaagcgcactgaaaaaaatctacgcgcacgtctgggagaaaaaaggcagcatctatctggaaggctgtgatgcggaattggaacgtcaggctcaagaggcgggatttaccgtatgcaaagatgcgttcccggcatgggcagagcgaaaggataaagcggtccatattaatttcaatcactctgaagaagcgcgtaaacaacggatcgaagccatgacgcacggtgtgacggtctttactgaaccggaaaccgtaaaggcatttttagcaagcggctccggcaaacctcagcctgtatcgctcaaagatctttatcaaaaggaagtggcatcatgcacacaataaaagcggaacacacattaacccatttgtacggcaaagattttctttcattaaaagatgtcagcccgtcagacatcaatgcgcttctgacagaagcttcattattaaaacaacatccgatacagccgattttccaagggaaaacattggcgatgatttttgaaaaatcttcaacccgcacacgtgtgtcttttgaagcgggaatggcccagctcgggggaacgggactatttctttcaagcagcgacctgcagcttgggcggggggagacggtcgcggatacggccaaggtgctgtccggcttcgttgatgccattatgatccgcacctttgagcatgaaaaagtcgaagagcttgccgagcatgctgatattcccgtcataaacgggctgaccgaccggtatcacccgtgtcaggcactcgcggatctgttaacaatacaagaaataaaaggaaaattaaaaggagtaaaagtcgcctatatcggtgacggaaataatgtcgcgcattcacttatgatcggctgcgcaaaaatgggctgtgacattgcggttgcttcgccgaaaggctatgaagcagaggaagaggcggtgaatgccgcgaaagaagcagcggctgtttccggagcgaaaatcacccttaccgaaaatccgcaggaagcggtgcgggatgcagacgtgatttactccgacgtcttcacgagcatggggcaggaggaagagacgcagcagcggctgaatgtgtttgctccgtatcaagtcaacgcctcactcgtcagtctcgccaaacccgactatacatttttgcattgcctgccggcgcatcgggaagaagaggtcacgtccgagattatcgacggcacgaactctgcggtattccagcaggcggaaaaccggcttcacgcgcaaaaagcgctcctgaaagctcttctatacaaacaggatgaacaaaaaaaccgctgaatctcattcagcggtttttgatatttctccgcatacaagcgcatactacataaaaaagaaaaaggaggaaatgacgtgggacagcagcatcaattccgcccgggacaaaaagcgccgaataacggtgtgtacgttgaaatcggcgaaacgggaagcatggtcaaaaatccgcaaaaaatcaaacttacggtgggagaaatgttccctgaaacttcaaaccacaacagattgtggacgtaccaacgaaaaccgtgaacacaaaaaaacctgctgaatagcaggttttttatttaatgctggtttgcatcctgtttgacaggcatgatctccgcaagaacaaagactagcaccgcaataaccacggcaataacggatgattgcttgaaattgtacgccgcgctgttcatggaggcgaccaaataacaggccatatgtgttaaaaggaacgtccaaataaaaccgataataaaccgcacgtttccacctcgtccttcattttattctacgttgtatcataccatacataaagcgcgggcggaaggtcattttctcatcaaaaagcgcgcctgaaactgacatgtgcccgcctgtcttgccgtctgacggaaaattcggttcctgtgcttgggataatagccaaaacatagcagcaaataggagtttatccgatccgttttcattcttcttacatatgatagccaatagagagattaggagtaaaaggaggcgggcaggcatggggataacggaaagatttttccaattcggatctgagctgaacgtcatccatctgccgtatcggccgaacggcttctgtatctttattctgggggacagaactcactttgtcagccgggactcaagcttttggctcgaacatgaagggagaaaccagctgttaaatacgctgcttgacagagggtacaccattttcaacagcaatttatacggacggcattggggttcggaaaaagccgccctttacgccagacagctgattcattatgtgctgaaacaagaaaccctcaatccgaaaatacacttgctcgcagaaggcatgggcgccctcatcgccgatcaattgctgcagtcttcaccggagcatatccgttcagccgcaatgttagatccttgtctggaccttcaagcccattttgaatcagagaaagaaaataagtttttttataagcagtttctgagggaaacggcacaaagcttcggtgtttctgaaaaagaggcaagctcactgagctatcagaccattaccggctgccgcacccgcgtgccggtacatatatggcaaagaacgaccggagcgccgtacccgtacaccctgcacgcgaacgcgtataaagaagcccgggaaaagaccggaagcaagattgatatcacgtatcacctgcttgagaaccctgctcgtatgtacagagccatctgccggtttttccgcagtcatgaaaaagacctgtaatgaatagaatacaacagccatctcttttcagagggctgtttggcttgtgtgtgtatgaaaaaccggaaaggcggcagatgtgatgaaaacagcgctgatcattggagcagatgaatttctcggcctttcattgtgcgaacggttgatggatgaaggtgtgcacgttgatgtcattttggcagaaccggaggacaaaacgaggcagctgtatttagaagaacgtttaatgtggctcgcgagaaacgggctttttcaaataatagaggaaatcggtgaaaaggaatacgatcgtatctgcgttcaatacgggagcgggtgtctgcctgaaaaaagggctgagcctttatattggattgtttacagtgaggatcacggagactgggaaaaaaacggtcagcgggatacggcaaaagcgattatccttcctcccctttacggtccgtggacggaagcaaaagaagatggagaaagcaggatctttttagaagacgcggtctgggggctgatgaataagcttgaggctgacggcacagaagacgaaaatcagattattaccctggaaataaaagaaaaaacgcaaaaaacggaagcggaagaaaaaattaaagaatggaaaagacaattttcatcaatattcgacattttttaagaaataccttccatgttatgtgcattaccgctacaataaacgtatatcaattatacatgttatgagtttgaaaaggggttgaacatggcttgatcaccaggcttgtcatgatcttttctgtcctccttttattgagcggatgcacacaaactccgtttaaaggaaaaattgagaaggtcggaatgcttttccccgataccatcagtgacttggtatggggcacaaaaggttacaaaggtttattagcgatacaatctgaatttaacgttgacgtttattataaagaaaatatcagatccgatgaagatattttaaaagcgatagatgattttcataaaaaaggagtcaatcttttatacgggcacggaaatgaatacgaggaaatcttcaatatgatcagcaaggattatcccgacatggaattcgtcgtcgcaaacggaacggcgaaaagcgataatgtcacaagcgttcaccttatgggagaagcaatgggttttttcgggggaatgacggccgcccatatgtcaaaaaccaatgaggtcggtgtcatcgcctcctttttgtggcagcctgaagtagacggctttatcaaaggggcgaaatatgaaaagcctgatatcaccgtcaatactgaatttacggaccactgggataacggcaatgaagcgctgcatctttacgagaagttaaaagcggagggcacggatgttgtatatccggccggagacgggtataatgttcctgtcattcagcaaatcaaaaaagacgggctttacgccatcggctatgtcgccgagcaatcgaatctcggcaaaaacacggtgctgacaagcacggtgcaaaacgtagataaagcctatacattaattgccgagcaatataataaaggtacgctcaagagcggagatcacgactttgatttcagggaaggagtcgttgaaatggggacgttcagcccgctggtggacaaagcgtttcaagacaaaatctcagaccttgtcaaaacgtataatcaaacaaatgaactgccgtcaaatgaatagaggtggatacacatgcagcatgaaaagtctcttgaatttatgcagatcgcgatgaaatacttgccggaagcaaaggcggagcttgagaaatccggcatagatctgtctatggaaatgattcagccgtttatggacctgtttacatcggtcatggcggaagcgtatgagcttggcagatctgatgccggggagctgaataaataaagagagccactttttcatgaagtggcttttcacatgatttttttctttatggcggacaccatcggcgcaaagtctttaaatacgggctttaattgatccagggagttcatgatggaccccagctgattcaacacgtggttgtaatcgatctcttcttcgttttcagcctgaggctgctccgggttttcttccggttctttatcccggtctctggaatcgccgaacatcattttggagaaaatatccatagtgaagcctcctttcgtcttccttttattctatgaggagcagcgtccgatagtttagacgaatatattgccaacagaaaaaaaatagggtagaattagtacctgatactaataattgatcataactaattagttttaaattcattataaaaaaggagtcttttccaatgaaagctggaattcttggcgtcggccgttacatcccggaaaaagtgctgacaaatcatgatcttgaacaaatggtagatacatcggacgagtggattcgtacgagaacaggtatagaagaaagaagaatcgccgctgaagatatgtattcatccggcatggccgctgaggctgcgcaaaaagcgcttgatcaggccggcatttccgctgaggagcttgatatgatccttgtggcgacggttactcctgaccagtctttcccgaccgtttcctgtatgatacaagagaagctcggggccaaaaaagcgtgcgcgatggatatcagcgccgcatgtgcgggttttatgtacggtattgtaaccgccaaacaattcattgaatcgcaaacatacaaacatgtcctcgtggtcggcgtggaaaagctctcaagcattaccgactgggacgaccgtaatacggctgtgctgttcggagacggagccggagcggcggtcatcggaccggtcagcgacgacagaggcatactttcatttgagctcggagcagacggtacaggcggtcagcacttgtacttagatgaaaaagggcatacaatcatgcatggaagagaagtattcaaattcgccgtccggcaaatgggtgaatcgagtgtaaatgttattgaaaaagccggcctctccaaagaggacgtagactttttgattccgcatcaggcaaacatccgcatcatggaagcggcacgggaacgtttggagcttccggttgaaaagatgtctaaaacagtccataaatatggaaacacatccgcagcatccattccgatttcattagtagaggaactggaagcaggcaaaattaaagacggcgacgtcatcgtcatggtcggtttcggcggaggattgacatggggcgccatagcattacgctggggacgataaaaaaaggtgaggtgcacacaagatgagtaaaaaaagagtagtcgttacagggcttggagccttgtctccgcttggcaacgacgccgaaacaagctggaaaaatgcaatcggcggcgtatccggaatcggaccgatcacacgtgtggaatcggacgagtatccggcgaaagtagctgctgaattgaaagatttcaatattgaaaatcacatggataaaaaagaagcgcgaaaaatggaccgcttcacgcaatacgctgtcgtagccgcgaaaatggccgttcaagatgccggtctgaacatcacagacgagatcgctccgagagtcggcgtttgggtcgggtccggaatcggcggtcttgaaacgcttgaatcccaattcgaaatcttcctgacaaaagggccgagaagggtcagcccgttctttgttccgatgatgattccggatatggcgacaggccaaatctcaatcgctctcggagcaaaaggagtcaactcctgtacggtgacggcatgtgcgacgggaacgaactctatcggtgacgcgtttaaagtcattcagcgcggcgatgccgatgcgatgattacgggcggaacggaagcgccgctgacaagaatgtcatttgcgggcttcagcgcaaacaaagccctttctacaaatcctgatccgaaaacggcaagccgcccgtttgataaaaaccgtgacggctttgtcatgggagaaggcgcggggatcgtcgtgcttgaagagcttgagcatgcccttgcccgcggtgcgaaaatctacggggaaattgtcggctacggctcaacgggtgacgcctaccacattaccgcgcctgcccaagacggggaaggcggtgcgagagcgatgcaggaagcaatcaaagatgcgggcatcaagcctgaagaaattgattacatcaacgctcacggcacaagcacgtactacaatgataaatacgagacaaaagccattaagaccgttttcggtgatcatgcgtacaagcttgccgtcagttcgacaaaatcaatgacgggtcatttgttaggcgctgccggaggaattgaagcaatcttctccgtcatggcaattaaagacggcattatcccgccgacgattaacatcgaaacacctgatgaagagtgtgatttagattatgtaccggataaagcgcgcgagcaggatgtcaacatcgttctcagcaactcgctcggcttcggcggacataatgccactttgatctttaaaaaatatcaataatacagtttttgaccggctgcctgaaaaaggtggccggtttttttgtgcgtgcatatgataacaacaagaggaggcgaaccggtatgagcgtcaagcagacatatcaatggatggaaaaggcggcatccgtaaatgacctggccccgcatcttttgccgcttttttcaggggccgataagaaagagtggaagccgatactcgggatgctgcaaaaccacggcatgttccgccatctgaaggacggcgttaggaccagtaaacggctgaaagaaaaaggatgctacagccatatacaaaaagaggaagcctatttaaaggagaagtggaacgggccggacgtgccgatcgtagttttgcccgttgatgaacgaaaccggaaaatccgtcaggaattcggatcaaaatccggtctggcctttcgggacaaaatgttcctctttctatcgtcggatagttccaattcagctgtatccgcccttatgacacatgaatataatcacgtctgccggttagaacatgtgacaaaggacgaaaaagatgagacatttcttgatacaatcatgatggaggggctggcagaatatgctgtatatgagcggttcggctcaagtcttacggcggaatggacgtcctactatacgcctgagcagcttgattttttgtttgaaaaaagagtcaagccgaacctccgcttaacgagagacagcagaatgttttcccagctgttatacggaaaaggatacttcccctcaatgcttggctatgccgtcggattcaatatagtaaaaaaatatttaaccgaccatcaaaaaacagtaaaagaagcattggccatcccttcaaaaacctttctggaagcaacgctttaatagattaaaagaatggaaattatttaaggatattacatttatcctaaaaaattcttgcttttgtaataatgatgtaataatatacaactataaaatttttcgactattctatattttgtgatagcgaaacgtatgtttccctctgcttcagcggaatgagaaaggggcgtatcatgagcacactattagaagtgaataatttaaagacctattttttcagaaagaaacagccgatccctgcagtcgacggggttgattttcacattaacaaaggcgaaaccgtcgctcttgtaggagaatccggctcgggcaaaagcatcacctcgctttctattatgggacttgtccaaagctcgggcggaaaaattatggacggctcgattaagctggaaggcagggacctggcctccttcaccgaaaacgaatattgcaaaatccgcggaaatgacgtctctatgatctttcaggagcccatgacttccctgaatccggtgctgaccatcggcgaacaaattaccgaagtgcttgaataccataaaaaaatgaataaaaaagaagcggctaaaaaagccgttgagcttctggaactcgtcggattctccagagcggaacaagtgatgaaagaatatccgcaccgtctttccggagggatgagacagagggtgatgatcgccattgcgctcagctgcaatccgaagcttctgatcgctgatgagccgacgacggcgcttgatgtgacgatacaagcccaagtattggagctgatgaaagacctctgcaaaaaattcgatacttctattctgctgatcactcacgatttaggtgtggtttccgaagccgccgacagggtgatcgttatgtattgcggacaagtcgtagagagtgcgggtgtggaggacttatttttaaaccctcttcatccgtataccgaagggctgttaaactccataccggtgatagatggagagattgatacattaaaagcgatcaaaggcagtgtcccgacaccggataatcttccggaaggctgccgattcgccccgaggtgttcaaaagcgatggacaaatgcaaaacagggcagccggagctgataacgcatgaaagcggccgttctgtaagatgttttttatatgaggaagagggtgcccaatcaaaatgacagctgcaggccaagaaacgattttagagctgaaagacgtaaaaaaatatttcccgatccgctccggtttttttcaaaggaaagtcggtgatataaaggctgttgacggcgtttctttttcactgaagcgcggggagacgctcggcatcgtcggtgaatcaggatgcggcaaatcaacggcgggaaggacgatgatccgtttatacaagccgacagacggccggattctctttaaggggcaagatatctccggcttatctgaagaaaagctgagaaaaagcgtccgcaaaaacatccagatggtattccaagatcccttcgcatcccttaacccgaggaaaacgctgcgttccattattaaagagccgttccagactcaccatatgtacagcatgagcgagcggaacgagcgagtggaggagctgctggcgaaagtcggccttcacccgagctttgcaaaccgctatccgcacgaattttccggggggcagcgccagcggatcgggattgcgcgggctctgacgttgaatcccgagctgattattgcggatgaacccgtttccgcactcgatgtctccattcaggcccaagtcatcaatctgatggaagaactgcaggatgaattcaacctgacctatttgtttatttctcatgatttgagtgttgtccgccatatcagcgacagagtcggcgtcatgtatctgggaaaaatgatggagctgaccgataaacacgagctgtacggcaatccgcttcacccttatacgcaagcgcttttgtcttcagtgcccgtcacgagaaaaaaagacgccgtcaagcgggaacgaatcatcctgaaaggagaactgccaagcccggcaaacccgccgaaaggctgcgtgttccacacgcggtgcccgatggccaaaccgatctgcaaggaacaaatcccggcatttgaagaagccgctcccggccattacgtcgcctgccatttatatgcctgaaatgacaagcatcgagagggggtatgccggattacataaccagtttgctgcatatatatcacaaagggggaattgatatgaaattacgtaaaagcgcactgatgatgctaagtgtttttatggcgctcgccatcttcctgtcagcctgctccggctcaaaatccacaagcaccgaatccaaaccggcaggaaaaccgcaaaaaggcggagatttggttgtcgggtcaaccggggaacccacactttttaatccactttattctaccgatgttgcaagttctgatattgaaggcatgatttacagcacattattggaaacggatgagaaattaaacgtcaagccgtcgctggctgaaaaagtaacagaagctgacgggggattaacgtatgatgtaaaactgaaaaaaggcgttaaattccatgatggaaaagagctgacggccgatgatgttgttttcacctacagcatccctcttaacaaggattacaacggtgagcgtggctcgggttttgagtcccttaaatccgtaacgaaaaaaggaaaatatgaaattcagtttaaaatgaagaaaaaagatgcctatttctataatgtcgttctcgacagttacggcattttgccaaaacatatattgggtaaggtgccggttgcagatctgggagagaatgaatttaaccgtaaaaatccaatcggctccggtccgtttaagtttgttgagtggaaaaaaggtgagtatgtcaaactggaagcaaatgatgattactttggcggcagaccttaccttgatacagtgacagtcaaaacaattcctgattctaacgcggccgtggcccagttaaaagcgggagatattgatttcttcgttgtgccgggcacagattttgatacggttaaaacgtttggaaacgtgaaggtcaaatctgatctcggcttaaactacagctatatcggctggaatgagaaaaaagagctttttaaggacaaaaaagtgcgtcaggcattgacttacgctcttgacaggcaggcaatggtggatcaagtgctgaacggagacggtaaggtagcggatgttcctgagagtccgctgtcatggaattatccgaagtctaaagtgccgacatttgattataatccgaaaaaagcaaagcagctgctaaaagaagccggatgggaagaccatgacggtgacggctaccttgataaagacggaaaaaaattctcatttgaaattaaaacgaatcaaggcaataaaattcgtgaagatttagctgttgtcgttcagcagcaattaaaagaagtgggaatcgaggctaaaccgcgaattgttgaattcagtgcgttaatcgaacagacaagtgcccctaattgggattatgacgctcttcttctcggatggagtcttgcaacgttcccggatcaattctctatcttccattcaagccaatcgaaaaacgggctgaataatatctggtataaaaacccgaaagtcgataagctgcttgaagaagcgaagtcaattacagacagaaaagaataccaaaagaagtatgaagagatatacaaattaattgctgaagatcagccgtacagcttcttattctattacaattaccacagagcgatgccgaataatttacaaggctatgtattccaccctaaaaatgacttgtacaatattgaaaaatggtggctggatcaaaaatagcaaaagccctggagagggaaggaggttcctttcctctcttatcctatttaaaaaggggacaagaatatggttacatatattttacggcgaacattaatgtccttgccgattctcttaggcattacaattttgtcgtttgccatcatgaaagcagcgccgggagacccgatgtcacttatgatggaccctacaatcagtcaagcggacagggcgaaattcattgaaaaatacgggttgaatgatccggaacctgttcaatatgtgaaatggctggggaatatgctgcaaggggattttgggacttctatcgtcaagaaaggcactccggtttctgaacttatcttatcccgcttaccgaatacgattgtgcttatgcttttctcaacccttgtcgctcttctgatttctattccatttggtgttctgtcagcgaaacgtccttattcaaaattggattacgggataactgttacttcatttttagggcttgccattccgaatttttggttcggtttgattttaatcatggttttatctgtaaatctggggtggtttcccactggcggagtaagcactttgaatgctgactttaacatatttgaccgattgcatcacttgattctgcctgcttttgtgctcgccacggcagacatggcagggataacgagatacacaagatccagtatgcttgatgtgttaaaacaggattatatacgaacggcgcgtgcgaaaggattccgagataataaagtgatttttaaacacggtttgagaaacgggcttcttcctgtcatcactatttttggtttgatgataccgtcatttatcgggggagcggtagtggtagaacagatttttacttggccgggtctcggcaaattgtttattgattcagccttttcgcgggattatccggttatcatggccatgacggtcatttcagctgttttggttgtagtggggaatttaattgcggacatcttatatgcgctggttgatccccgcattgaatattaacaaagagaggtgagaggtcaaatgttacagccaaataccggcacaccccccagcgaagtgaaattaaaggaaaatattcaatccaaaccggaaacaatgacgaagatttttttcgaaaagttctttcaaaataaactagctgtaatcggagccgttatattaaccatcattatcttgtcagctttattcgcttcggtaatcgctccttactctccggagagtcaatctctcatcaatcgtttgaagccgccgagcttaaaacatctaatgggaactgataaattcggaagagacatctttacgagggttctgtacggggcgcgcgtctccttgcttgtcggattcgcttctgtgatcggcgcgattacaatcgggacagttgtcggagccgttgccggatattttaaagggtttgtcgatgccgttctcatgagaaccgttgatatcgtattatccatacctgatatatttttgttaattacacttgttacgatttttcagcccggaatggataaattaattttaattttctcccttacaggctggacaacaacggcacgccttgtccgaggagagtttttatcgcttcgttccagagagtttgtattagctgcaaagacgatcggtacaaaaaaccatcacatcatcttttctcatatactgccgaatgcgctcggaccgattatcgtctcagccacattaaaggtgggaacggttattttggcggaatctacattaagttatctcggtttcgggattcagccgccgatcgcaagctggggcaatatgcttcaggatgcacagaactttacgcttatgatacaggcttggtggtacccgttattcccgggtttgttgatccttcttaccgtattgtgcttcaactttgtcggagacgggctgcgtgatgcgcttgatccgaaaaatgtgaaatgatctcccggacgaacgggagatttttttgttgcaatgcagtcggaaatccagctccgtaaaacggaaatctcatattgaaatggaataatttatctatcccttgcctatactgtggacaacagtttttataaagtgaggggtcgaatatgttatttcttcatgatgtatgggtcaattggtttgaaggggaagaaaacggctacaatgtatgccattttcacgaatggcggaaggaagacacggttgagcttttggatcagacgccgctgctcagagtgccgtcagtattatttcattacatagaaaacgacttatcagagcttccgaaagagctgcttgaccaagtccaccagaagtcatacgtgcgaaaaaatcatgagcggacaaagctggagtactgttttgtcgtgacagacgggatcggcatcattgccgtggatacgatcgggtataccattccggtcagaaagagccgcctgattccgagacaggagcagcttgtttatgaaatggtaaaggatgtagaaccggaatcgtttcaatttgagccgtcgcaattggagtcttcaaaggaatatcacattttgtcattggcgccggggcatgtcagaggtctgacgagaaaagagcggcagatcaagcagctgatgtttatggcgctcgaccagctgaaagggctgaaaaaccgtgcggaaattgtgtattggtacacggaatggaatccgcatatgtatgagcagatcaaacggatgagttttgaagagatctgggacatgctttacaatgaaacaattgaaggctggtcggataaacatcttgcgttctgtgaaaatttgattaaagggcagccgtttttcgaaaagctttgggaaatggaacaggaatcaaaagtgaactaaaaaaagaggcggggattctcccgcctcttttttttatcttcttttccgtccgagacccatggcgttttccattttcttcaccattttgccggccgttttgtttgcgcgcgccgccccttcgtcgagaatgcggtcaagctcgtcgctctcaattaattcacgatagcgctcttggatcggtgtcaatgcgccgataacgacttcggctaaatcgcttttgaattcaccgtaccctttgccttcatatttagcttctaattcttcaattgatgtgtttcctaaaatagaataaatcgtcaaaagattagaaacgcccggtttgttttctttatcatactttacaatgccttcagaatcagtcacggcactcttgattttcttctcgagctgcttcggctcatcaagcagcgtgatgaatgccttttggttcggatctgatttgctcatttttttgagcggatcagccagtgacatgatgcgcgcgcctgattcaggaattttcacctcaggaatcgtgaagatgtcattgtattttttattaaagcgttccgccaggttgcgggtcagttcaagatgctgtttttggtcttctccgaccggaacaagatccgttccgtacagtaaaatatcgccggccatcagcggcggataggttaacagtccggacacgacggcttctttgccctttgacttatccttaaattgagtcatccgctcaagctcgccgatatatgcgacgcattggagcatccaccccgcctgggcatgagcgggaacttccgactggataaagagggtcgctttctcgggatcaagtccgacggccagataaagagccgcgagattgcggatgttcttccgcagctcaagccgatcctgcggaactgtaatcgcatgctgatcgacaatacagaagtagccgttgtagtcatgctgcaaatcaacaaattgcttcattgcgccgatgtagttgccgagggtaacggaaccgctcggctgaatgcctgaaaaaatcgttttcttcatagttcttacctcatttcttaaaacataataaaaaaagcccattcttcccgtagaaaaaagggacgaatgaaccgtggtgccaccctgattattccattacaatggaatcgctcgagacgttggtaacggaggctgctccggctgggcctactaacgttcggtcagctgctcagaagtccattccacatcgcccgttacctgctcccagcaccgcagactctcttcaaacggatgaaaatgtgtactactcttcatcatcgcaatcacaacaaatgtatttgattgatctattataaatcaattatagccaaatgtcatcagaggaatacaagcttatttccagtttactttaggggtggaaatcctcaaaaagaactgaaaaagcttaaatgataacgtatatcaacatttcgtataacgaatattatatgtaaaaagcaatatgaactggaaattacattaaaaaaatttagttaggtcatgctttaaactatagaagtgtatcacctttttgacagaaaaactgaccaaatttaaatattttaaattgagaaaatagtattgcaataaattattcatttcattataatgaacttgttcactctattgttacagcttctttacataaaataatcagaaaagacggaacacaattaaagtttagaaaaatattaagttattttgtctgatatttctgagtatttagtagtaaaggctgaaaaatttgattagggggttagtgcatgaaaaagcgttggtctattgtaggtttgatgcttatcttctcgcttgtattaagtgcgtgcggcggattcagcggcggatcaggcggcggcaaaaaagacaccaaaggacagacttcacttaatatcaatattaaaaccgagccgttctcattgcatccgggtttagcgaatgattccgtttcaggaggcgtaatccgacagacttttgaaggattgacacgcgtaaactccaaaggtgaccctgaagaaggaatggcatctaaaattgaaacaagcaaagacggaaagacctatacatttacgattcgtgacggtgcgaaatggtctaacggcgaccctgtgacggcgcaggattttgaatatgcatggaaatgggtgcttgacccgaacaacgaatcacaatacgcttatcagctctactacatcaaaggcgctgaagctgccaatacaggaaaaggcaagattgatgatgtaggcgtaaaagccgtaaatgacaaaacattaaaggttgaactgaataacccgacaccttatttcacgcaattaacttcattctatacgtatatgccgatcaacaagaaaatcgccgaaaaacataaaaactggaacacaaacgcgggcgaaaattatgtgtcaaacggcccgttcaaaatgacggcctggaaacacagcggttccatcacgctcgaaaagaacgatcaatattgggataaagacgctgtgaaattgaagaaaatcaacatggtgatgattaacaataacaacaccgaactgaaaaaattccaggccggtgagcttgactgggcaggaatgccgctcggccagcttccgactgaatctctgccgacattgaaaaaagacggatctcttcacgttgaaccgatcgcaggcgtgtattggtacaaattcaacacagaagcgaaaccgctgaacaatgttaacatccgtaaagcccttgcttatgcgatcgaccgctcgtccatcgtgaaaaatgtaacgcagggcgaacaaatcccggccatggctgcggtgccgccgtcaatgaagggattcaaggataacacaaaaggttacttcaaagacaatgacgtcaaatcagctaaagaattcttaaataaaggactgaaggaattaggcgtcaagagtgcctctgaccttccggcgatcaagctgtcctacaatacggatgacgcgcatgcgaaaatcgcgcaggccgtacaggaaatgtggaaaaagaacttgggcgtcaaagttgaacttgataactccgaatggaatgtttacatcgacaagctgcacagccaaaactaccaaatcggacgtatgggctggctcggcgatttcaacgatccgatcaacttccttgaattgttccgtgataaagaaggcggaaacaatgataccgggtgggaagatcctgagtttaaaaagctgctgaaccaatctcagcttgaaacggatccggataaacgtatcgaagagctgaaaaaagcagaaaagatctttatcgacgcaatgccggtcgcgccagtttatttctatacggatccttgggtgcaggataaaaacctcaaaaatgtgatcttgacaggaacaggcgaagtttacttcagaaacgcttcttttgaataaaagccggttctgaaaacaaaagacccaaggtatatggggaggatgtccccatatacctttcttactgattacgtataaaattgtaaaaaacatggaggtgttcaccttgctgaaatatatcggtaaacgattcatttacatgatcatcacattgtttgtgattgtgaccgccacgttcttcttaatgcaggcagcgccgggcggaccattttccggcgaaagaaagctgccgcctgaaattgaggcaaacttaaacgaacactatggtttggacaagcctcttttcgttcaatatgtcagctacttaaaatctgtggcgatgtgggacttcgggccttcttttaaatataaaggccaaagtgttaatgatttaatcaattcaggcttccccgtctcattcactctcggtgcagaagctattctcctcgctttagcgttcggtgtgcttttcggggtgcttgctgccctgtaccataataaatggcaggattataccattgcgattttaacgatctttgggatctcagttccgagctttatattggcgacgattttgcaatatattttctcaattaaattagaactgttcccggtcgcaggatgggaatcctgggcatacacctttctgccctccattgcgctcgcttccatgccgatggcgttcattgccagactctcccgttcaagcatgattgaagtgttaaacagcgattacatacggactgcaaaagctaaaggactgtcccgtccgtcagtcaccgtgcgccatgcgctgcgaaacgcgcttttgccggtcgtgacatatatggggccgatggcggcatccattttaacgggaagtttcatcattgaatccattttcggaattcccggtttaggcgcgcattttgtaaacagcattacaaaccgtgattatacggtcattatgggagttaccgtgttcttcagcgtgctcctgcttctatgcgtattaattgtagacgtgctgtacggattaatcgatccgagaatcaagctttccaaagcaaagaaaggagcctagaccatgcagaacattcctaaaaatatgtttgaaccagcttcagctaatgccggcgatgccgaaaaaataaataaaaaaagcctttccctctggaaagacgccatgctccgcttccgcagcaataagcttgcgatggtcgggttcgtactgatcgttcttattattctgatggcgatttttgcgcctatcttttcaaggtatgattatgccactaccaatctattaaatgcggataaagcgccgtcgaaagatcattggttcggcacggatgaccttggaagggatatattcgtccggacatgggtgggcgcgcggatttccatctttatcggtgtcgcagctgccgtgcttgatttattgatcggcgtaatctggggcagcatttccggattccgcggcggacgcacagatgaagtgatgatgcgcatcgccgacattctgtgggctgttccttcattattaatggttattttgctgatggttgtcctgccgaaaggattgctcaccattatcgtcgccatgacgatcacgggctggatcaatatggcgaggatcgtccgcggacaggtgctgcaattaaagaatcaggagtatgtgcttgcttcacagacactcggtgccaaaaccggccggcttttgtttaagcatatcgtcccgaacgcgatgggctctatactcgtaacgatgacactgacggttccgacggcgatttttacagaagcgtttttaagttatttgggcctcggcgtacctgcgccgcttgcgagctggggaacgatggcctcagacggattgcctgcattaacctattacccttggcgtctgttcttccctgccggctttatctgcctggcgatgttcggctttaacgttgtcggcgacgggttaagagacgcgctggatcctaagttacgcaaataaggagtgatatgagtgacacgtttgctagaagtaaaagacttagccatttcatttaaaacatacggcggagaggtacaggcaatccgcggcgtcaatttccatttgaataaaggagagacgctggcgatcgtgggggagtcgggttccggaaaaagtgtgacctcccaagcgattatgaagctgattccgatgccgccgggctactttaaaagaggacagattctttttgacggacgcgatatcgtgccgatgtccgaaaaagaaatgcaggccatcagaggaaaggacatcggaatgattttccaagatccgatgacctctctgaacccgacgatgagagtcggcaagcaaattacggaagtgcttttcaaacatgaaaaaatctcaagtgaagcggcgaaaaagcgcgccatagagctgcttgatctcgtcggaattccgatgcccgaaaaacggatcggccaattcccccatgaattttcaggcggtatgagacagcgtgtcgtcatcgcgatggcgcttgcggcaaatccgaaactgttaattgccgatgaaccgacaacagcgcttgatgtgacgattcaggcacagatccttgagctgatgaaagatctgcaaaagaaaattgatacgtctatcatttttatcacgcatgatctcggcgttgtcgccaatgtcgccgaccgggtcgccgtcatgtacgcgggtcaggtcgtcgaatcgggcacggtggatgaaatcttttatgatccgcgccatccgtatacgtgggggctgcttgcctcaatgccgagtctggacagcaccgatcaggaaaaactgacggccatcccgggtacgccgcctgatctgacgaatcctccgaaaggggatgcatttgcgctccgcagctcatatgcgatgaaaattgactttgaacaggaaccgccgatgtataaagtgtctgatacgcattttgtgaaatcgtggcttctgcatcctgatgcgcctaaggtcgagccgcctgaagcggtgaaggctaaaatccgtcagcttccgaatacgtatcagcatcctgttttaatgaaggaaggtgaaaaaaatgactgagaaacttctcgaaatcaaacacttaaaacagcattttttcacgcagaaaggaacggtaaaagccgtagatgatttgtcatttgatatttataaaggcgaaacgctcggccttgtcggagaatcgggctgcggtaaatcaacgacgggccgcagtattatccggctgtatgaggcaaccggcggggaagttctctttaacggggaaaatgtccacgggaaaaaatcccgcaagaagctgctggagtttaaccggaaaatgcagatgattttccaggatccgtacgcatctttaaatccgagaatgacagtcgccgacattattgccgagggaatagatattcaccgcctggcaaaaacgaaaaaagagcggatgcagcgggttcacgaactgctggaaacggtcggtttaaataaagagcacgccaaccgctacccgcatgaattttcaggcggacagcgccagcgtatcggaatcgccagagcgctggcggttgatccggagtttatcatcgcggacgaaccgatttcggcgcttgatgtctccattcaggcgcaagtcgtcaatttaatgaaagaattgcagaaagaaaaagggcttacttacctgtttatcgcccatgatttatcaatggtcaaatacatcagcgaccgcatcggcgtcatgtatttcggaaaattggtggagcttgcgccggcggatgagctttacgaaaacccgcttcacccatatacgaaatcattgctgtccgctatcccgcttcctgatccggactatgaaagaaatcgcacgcgaaagaaatacgatccggcagttcatcagctccaagaaggagaaaaaatggaattcagagaagtgaaaccgggacattttgtcatgtgcacagaagctgaatttaaaacctatctataaacgtatcatcctccaagactgagtcttggaggatttttttgcgcacattcaagtttattaagcctgctcccgtttttctataatggaaaaaaagggggagatcagtatgaaaaccattttgtgcgccatttgtgcgggactgtttatcagtgcagccgcttatccggcccatgccgctgtgaaagaggagcagccgcttgtaaaagtagcactggctgaaaaagaattgccgaaatcaaatgcacggttcgcttatccgtcagggctgcatttttcacatcctgataaggtgcggggcatttacgtcacaggacattcagcgggaggaagcaaattcggggagctgacagactttgtggacaaaacggagctcaatacaatggtgattgatgtcaaggacgacaacgggaacctcacctttaagccggacggccattctgagtatgccaaaatcgccaagccgtacatcaaagacccaaaaaagatgatgaaaaagctggaggaaaaaaagatctatccgatcgcgcgtattgtcgtatttaaagacagcgaactcgcgaataaaaagcccgagtggtcctttaaagaaaaaaacggaagtgtctggaaaaacggccgcggcgaatcgttcgtcaatccgtttatgaaagaagtatgggattacaatgtaaagattgcaaaacaagccgtaaagatgggttttcaagaaattcagtttgattatgtccgttttcctgaagggtttgaaaaacgtgatgacgaactgacatacggacacggcgattacggaaaaacagcagacagcaatgtgcaaaaacgcgttcacgccgtcaccgattttgtcggttatgcgaagaaaaaactcaagccgtacggcgcggatgtgtcggttgatattttcggctattcagccacgctgccggaagcgcctggtatcggccagaatttcagcaaaatttcagaccaggtcgatgtcatttcatccatgatttatccgagccattggacaagctatttcggcattgataaaccggatcttgagccctacaatgtcgtcaaagaatacgcgaaggtggaaaataaaaagctgtccaagctgaaacacccgcctgtatcgcgtccgtggcttcaggacttcacggcatcatatctcggcagcggaaattatcaaaagtacgggaaacgccaggtggaggaccaggttaaagcgctgcatgatgaaggaattgacgaatttttattgtgggacgcggcaaaccgttataccaaaaacgtcgattacacaccattttaaaaaaattgaaaccatgttaaaggatcacacgtcttaatagatgtaagattgtttaaacaatcggaaatggggtatatctaaaagtgtgaagacaacgaacccataaggagcaaatgaatgaactggtacgaaaagctgagtgaatattttccgattgaagaaatgaaatcaaaagcgcatatggaagctctgttaaaggagcaaagcgatgtttatcataaagaagaggggcagtaccacgtgctgatgtatgcggaatttgactctttcatctttattgattacctgtttgtgtcaaagaaatccagaggacaaggcctcggaagcaagctgatcggcagactgaaaaagaagaacaagccgattctgcttgaggtggagcctgttgacgaggatgacacggatacacagaaacgcttgcgtttttatcaaagagagcatttcaagcacgcgcagtcaatcgggtatcggcgccggtcattggctacgaatgaagtgaacaaaatggagattctgtactggtcacctaagacggaatcagaagaagaaatatttgaagcgatgaaacagacatatgaaaacattcacacttataaagatgaaaaatggtacggagaatcatacgagaaaacggatgaagttctcaaagtcattgatgagaaaaaacaaaaaaacattttcgatcagctgagctaattgagaatggggaaaaatcctccagccgtaaatttgccggattgacacatttttttctcaggagactgttcacacttacttttttatagtataatacctataaagattccttttttaaagtcatttcaatttgagaatacaaacatgttcatcctactaattagaggagtgaagattaatggttacattatacacatcacctagctgtacgtcatgcagaaaagcaagagcttggcttgaagagcacgagattccgtttgtagaaagaaacattttctccgagccgttatcaattgatgagatcaagcagattctgcgtatgactgaagacggtacggatgaaattatctctacccgttctaaagtattccagaaactgaacgtaaatgttgaatctatgccgcttcaagacttatatactttgatcaatgagcatccgggactgctccgccgtccgatcatcattgatgaaaaacgtctgcaagtcggctataacgaagatgaaatcagacgattcctgccaagaaaagtgcgttctttccaattaagagaagcacagcgtcttgccaactgatataagcttacgataagcatggaaaaagcccaaaaccatcgcggtttgggctttttgttatttttcagtctgctggtaaatcatactggcgaggataacaaaaacaacggtcaaaatcggcagcatcatctgtatcatgccgtgttctgccatgaaaaatgacagcttgctgtctccggcaatcatttcaccgccggtaaatgcgagaagaccgctcccggcatacatcaataaaggcattttttccatggcggcatgaacgagcttgctgccccaaataataatcggcaccgagatgaagagaccgatcactactagtgtcagctcaccgtgagaagcgccggctactgcgatgacattgtcaagcgacataaagatatcagccagaacgattgtgcggatggctttccaaagagaagaactgcttttcacatgctgcgcatctttcttctcaatcagaagctgatagccgagatacaataaaaataccccgcctgcgcattgtaaaaaaggaacattcaataaatagaccgcagcgctcgtcagaacgattctcaagacgactgcgataaatgttccgaagatgatcgcttgctgtctttgtttatgggccagattccggctggccatcgcgatgacgacggcattgtcaccgccgagaataaggtcaatcccgataataagcagaagggacagcaggtaatcgtgcggcatggtaacacctcgcttatagatcgattgcttgtacagctaatatatgaagcagtgcgctatttatgatgggaaccgggagaaagcctgtttttcggtgtgaaaatgcttttttatttcttttataactgttttatcataaaatagaaatataaagaatttgcgctgtcttctataaggttaagatgtggacggaatgggtaaagtgtagtaaagtactattcatcgggagcttagatgtcccttcaacatcttataaagaagggaaggttggcaaaatggaaatagaaagaattaatgagcatactgtaaaattttatatgtcttatggtgatattgaagatcgcggttttgacagagaagaaatctggtacaatcgcgagcgcagtgaagaactgttctgggaagtcatggatgaagtgcatgatgaagaggaattcgctgtcgagggtcctctttggattcaggttcaggcattggacaaaggactggaaataatcgtaacaaaagcccagctttccaaggacggacaaaaactcgaactgccgatcccggaagataaaaaacaagagccggcagatgaaaatctcgatgctttacttgatgatttccagaaagaagagcaggccgagagccgggaagataaggagcaaaagcttcagttcactttgcggttcgatgattttgaggatctcatctcgctatcaaaattgaatcttaacggaatcaaaacgaccctgtattcgtttgaagaccgatattatttatatgcagatttttatgagcaaactgatgaagaggttgaaaatcagctaagcatcctgttggagtacgcgcacgaatcatcagtcagcattcaccgtcttgaagaatacggcaaattagtgatcgctgatcatgcgttatatacaataaaaaaacactttgcatcataaaaaaccgatttctctcagcagaaatcggttttttttgttctgaatgacaggatgaacggctgaaaaccgtataacggctctcatccgcaaacaggattatgccttcttcctgctgaatacaacaagattcaggaaaggagaagatgcaacatgttcagtgcagtgactgccggcggacggctcattcagctggccggaagctattcaaaggaaaaagcggcggagctgagaaagaaacgctggttctgccccgtttgcaaaagtgagcttgatatcaaactgggacgcgaaaaactgccgcacttcgctcataaaaaaagcaggctgtgtcccggggaatccgaacctgaaagcgaataccatctggaaggaaaaagacagctttttctctggctgaagacacaagggtgcagtgtcagcctggaaccgtatctgacttccgctggacagcggcctgacttgacggcagaaagcggagaagaaaggctggcttttgaatttcaatgtgcgaacctttcggcggactctttaaagagccggacggcaggcctgaaaaacgccgggtaccggccggtctggatcattggggcaaaacggttaaaacggatgaccgcgcaatttttccggctttctgcttttcactggcagttctttgaagtcaattcattttcctccttaatgttttactgccccgacgcccgctccttttacaggctgcattccatcactccgttttacaccggctattcttatgccggcttaaccgcaatccctcttcacaaagcaaatctgaaagacatttgtcatccggaagggcggcgcagcgtcagactttcctcgtgggggcgtgccgttaccggcttccgcaacaaaggcgggcggtttttatctgaagatgccggtcttatccggcgtcttttttacgaaagacatcaggttgcatttccatttctcccctctgaagtgtttattcccgtttcagcaggctttgtgtttgcaagtcccgtttttgtgtggcagggccatttatacttgcggcttgcggaactttctaaaaaaggcgcgccgatccgattatccggcatggttcatgatttacggcaaaaaatcaggcataaggagatccggatgcggtatggttcacaagacagccttatcggaatggcggtaaaacaatatgctgatttcttatgcttgcaggattttttaagggaaattgagaatgaagtatatatgccctcatctcaacagaagcgccctcaaacggcagaagagctgcgccggcgggacctgctcttttttggggaatgagaatgcttcatttcgttcaccctaacgtcaaggtggtggcgaatgtgaggggcgtacaagcattttgttttcgttttttcactgtattattggtatgctcggtcttatatgccgcatatgatttgacaaaaggcagtgaaaagccggaagataatcacaacacaagtttttggagaaacaatcgttttttcaattggcttgaagtaaagaaaacgagggggatcaccatgactgaggaaaataaagcagcacagctgcctgagagaagtgaagtaaaggcagagcatacatggagactagaggatatttttcctagtgatgaggcctggaataaagaatttcaagcagttaaagaattaattccgaatttatcttcatttaaaggcacgcttgctcattcggctgataatttatacgcggcgcttacggcacaggatgaagtgacgaaccgccttgggaaactttatgcatacgcacatatgcgctcagaccaggatacgggaaattctttctaccaagggctgaacgacaaagccgcaagcctgtattctcaggctgccagcgcgactgcttacattgaaccggaaattctggcgattcaggaggacaagctgcaccagtttattcttgaaaaagaggagcttaagctttactcccatgcaattgaagaaattacaaaacagcgtccgcacgtgctgagcgaacaagaagaggccctgcttgcggaagcctctgaagcgctgtcttcgccttccaatacattcagtgttttaaataacgccgatattacgtttccgtcgattaaagatgaaaacggcaaggaaactcaaatcacacacggcaactttattaatttcctggaaagcagcaatcgtgaagtccgcaaaaacgcatttgaagccgtatataaaacatacggacagtataaaaacacgatggcgactacactcagcggcactgtaaaaaaagataatttttacgcccgtgtgaaaaagtataaatcagcacgggaagcggctttatccaataacagcattcctgaagaggtttacgataaccttatcaaaacgatcaataaacatcttccgttattacaccgttacattgacctgcggaaaaaggtgctcggccttgatgaagtccatatttatgacctgtacacaccgcttgtaaaagattcgggaatgaaggtaacatatgaggaagcgaaagattatatgctcaaaggacttgctccgctgggcgaggaatacgcgtctattttaaaagaaggacttgaaaaccgctgggtcgatgtatacgaaaacaaaggaaaacgcagcggtgcttattcgtccggtacatacggcacgaatccgtacatcttgatgaactggcatgataatgtcaataatctgtttacgctcgttcacgagttcggccattccgtgcacagctactatacgagaaaatatcagccgtatccgtacggtaactacagcatttttgtcgctgaagtcgcttcaacgactaatgaagcgctgctcggtgaatatatgctgaacagcttaaaggatgaaaaacagcgtctgtacctgctcaaccacatgcttgaaggattcagaggcacagtgttcagacagacgatgttcgctgaatttgagcatctgattcatacgaaagcgcaggaaggcgagccgctaacgcctgaactgctgaacgaactttattatgatctgaataaaaagtatttcggtgacaacatggtgattgataaagaaatcagtctggaatggtcaagaattccgcatttctattacaattattatgtgtatcaatatgcgacaggctacagtgcggcccaagcgctgagcagccagatcttaaaagaaggcaagcctgcggtggagcgctataccgaattcttaaaagcgggaagctcggaatatccgatcgacatactgaaaaaagcgggagtcgatatgacatcgcctgaaccgatcgaggcggcctgcaaaatgtttgaagagaaactgaacgaaatggaagagcttctttcgaaagtgaacccttcgtaattcaaaaaagcctgtgcattaaatgcgcaggctttttctaaaaccccttaaacgtttttcggtgattcagccggtacagggcaaacaatatggacagaaacagcagtggagatgtaatgtaaatcggcagcatgtgcatcatggccagcaggtttaaaaagaagaaaaacacaatcattccgatgatcaatacggtgcggagcattgatttccctccttgtttatgattgatatattctatgaaaacaagcagtcagttatgttttgtgacaaaaatatgaacattaatcttatggcttgtcaaaactcgacaagatttgatatgataaggatgtgaaattgatcacaaacaaacattacccctttgtttgaccgtgaaaaatttctcccatcccctttgttgtcgttaagacatatgaaaccgcgcttatcccggcgcggtttctttatttgcacaaaaaaagccggctccgtaaggaatcagctttttttaatggtcacaacaggtgacatcctcctgggttccggccagagatttccaaaacagaccgtgctttgcttccactctggcgacctttttggcgaatgccagttttttcatttctttttcaacttcttctagactcaaatcataaacgagtgcgatttctttcgatgcgacaaaccggaaatattcaatgaaacattccaaaggcggcgtttcagaaggcttcggttcatccccgagcatttcgaataagatctcttcgtatacgtcataagaatagttgccgggaaccttcagcccttcatcatcatgcaggctgttaaagaacgtcaatgtcgggttgacggtgacgtccatttccgccgcgattttcatatcgcactgaagcgcttttaccgcgctttgcgaatggaggtcgcgcttgaattcttcaacatccaatttcgtcttttcagcaatttctaaaagaacgtcttcatccgtaatattctgcttggagacaaacaggctttcctgcatgctgcggagaaacagaatgcccgcttttcttccctgcagttcggccgcttttaaagcgagtgcggcaaggtagggcgatgcaagaggctgatcctgctcaagccaaaggcttccgtcacagggcatcccggaacggttcgcaattttttcccaagcttcggcaagaaggtgttttttccgcttttgcttattcagcgatgtaatgctcgcggaaacaatgatccgcagggtgaaaaaacgtccgtatttgatttttaatttttttatggcgggctccagcgaccagcattcaggacataaagggtcgacaaacatgtaaatttcgagcggtttttttggatgtccgtggcaatgggcgaagtattgctcatgctgataattcgtcaatatgatcgatcctccgcttctgactggtttaccatatgcctggccgtcagttccagacgcccgtacagaaattcacgaatatcgccctccagcccgacctgatccatcgctttgctcatacagcttagccacgcatcagccctctcatccgtaatcggaaaggggagatgccttgccctgagcatgggatgtccgtgctcttcagtataaagaggaggtccgcccaaatactgggttaaaaattgcttttgttttctggccgtttcagtcaaatcacttggaaatatcggcttcagcaagggatgagacgagacacgctcataaaaagtatcaacaagttgcgatagaagttcctctccaatcgcttcatatggtgcgttaaacgattgtcccatgttgactactcctttatatggctaataggaatcataattcccattgcgaatttatctttcagttttactatcttcagttactgtatattttagcaataacattttatttctacaaacaaagtgcctttctgtcaggcgcttgtatttcatatcatatcacatcgccttcattcatgtgtaagatttcactccgcaaaaaaaccagagggcgaaggaagcctctctggtttacgcgtaatactgccgggttatgtttttgacatattgctgtgtttccttaaacggcgggatgcctccgtaccgatctacgttgccggggcctgcgttgtaggcggctaacgcgagagatacatttccgtcgtatttcgtgagcatctgctttaagtactttgtgccgccctcagcgttctggacgggatcaagcgggtttgacaccccgagtgattctgccgtggaaggcatgagctgcatcagccccattgcccccgcaccgctgaccgctttcggattaaagcctgattcctgtttaataaccgcgcggatcagtttttcgtccactccgtatttttcggctgctttctgaatggcgctgtctattgaaaagtttccggtgctgatgtcagaagccgcattcggagactttatgctcggggaaacggtctgtgaagctgccgcggaaccggatgaaaccggaattctcggtgaatatgaagcgtgagcggtccgcacaccgtttaaaatccctgattccggctgctgccggacggctgtgtccgtatactggctgagcagcgcgctgaaattggcaagcgggctttctgaagattgtccgcctgaatccgtgcttgtatgagagattgattgcagcgccattgactgcagctggagaagggccgcccaattcgttatattcactgtgtcattccacctttttttgtttctgttcataaaaacgctggattttatttttcgtgatccgctctgggatgccgaattgcttgagcaattgttcaaacgcctgttttccttcatcccagtcagcagcctcgaattccaattcaaagtcttctttctctaaatatcggctgtgatctaaaatgattaagcctttttctgattctttttccgcgcgtgcggtcgacagcgttccgaagcagcaaatgtgttctgaacggattccgagaccgtccagctgccgtttgacggggccatccggaatcttgaagacgtcaagatccggtgccgccgcaagctgttggtgcgtttccagcagaccgaccgcggcaggttcttttaaagtcagaacgaacgagccgtctttttctcggatgcggagtgctgattttttttgtttcagggaaaaatctttcgtgtcgaaataatgattgacctgctgtttaaaatcatattctttcatgcagagtgcttcactcagcttcagaaattctgattttgtcagcaggtttttgaattcaatttctatttcttgggtcatgacagtcttcctttcaggacgaaaaattgtataattcccattatctctttagaggttacgtttatcaatatcgaccttgatatgataaaataaatgctgtactttgttaaaaaaggagaacattatgcaaaagagaattgaaatccagaatgcatcattaacagaagacgcgctccgcttgaagtgcggagaagacttaagcggagcggaacgcaaagcctcaggtcaaatgcttgttgattccgatcactttgcttttgtatacatacttgaatcagctgactcttttgaatatgtcattataaaagaacatgtctggccggatctgaaagaagccttagaccaaggaaaaccggcggtccttgaggccggcgcgaaaacggttgaactttcagggctgcatgaagaactcgattatcttcttgaaaatattaaagataatgcaaactacggagatatggaagaaaaagtgaaaaacgtatttctttagaacaggttcggaattgggggatgtacgatggatgacaaacaatgggagcaatttctagcgccataccgccaggctgttgaagaattaaaggtgaagctgaaaggcgtcagaaccctttatgagtatgaagatgaccactcaccgattgagtttgtgacaggccgcgtgaagccggtggcgagcatacttgaaaaagcgagacgaaaaagcataccgcttcatcagattgaaacgatgcaggatatcgcggggctgcgtattatgtgccaatttgtcgatgatatccagatcgtcaaaaatatgctgtttgccagaaaagattttaccgttgtcgataagcgggattacatagcagagcataaggaaagcggatatcggtcttaccaccttgtcgttttatatcctttacaaacaacgtccggtgaaaagcacgttcttgtggagatacagattcggacgcttgccatgaacttttgggcaaccattgagcattcactgaattacaaatacagcgggaacattcccgaaaaagtaaagctgaggctgcagcgggcctcagaagccgcatcccggctcgatgaagaaatgtcagaaatccgcggagaaatccaggaagcccaagccgcgttctcgcgaaagaaaaaagcgggagaccgccagtaggaaggaaaggaggggaatggcatgaaatttgccgtttcttcaaaaggagacgaggtttcagatacactgaaaagcaaaatacaggcgtatttactcgattttgatatgaccttggatgaaaaagagccggaaatcgttatttccgtcggcggtgacggaacgcttctttacgcatttcacaggtacagcgaccgtcttgataaaacggcttttgtcggagttcacacggggcatttgggtttttatgccgattgggttccgcaggagatagaaaagctcgttctggccattgccaaaacgccgtatcataccgtggagtatccccttcttgaggtgattgtcacttatcatgatgaagagcgtgaggagcggtatctggctttgaacgaatgtacgatcaaaagcatagaaggcagtctcgtcgctgacgtggaaattaaaggccagctgtttgaaacgttcaggggagacggtttatgtctgtccacgccttccggaagcacggcttataataaggcgttaggcggtgcaatcatccacccttccatcagggcgattcagcttgccgaaatggcatctatcaacaacagagtgttcaggactgtcggctcgccgcttttgcttcccgatcatcataactgtgtcatcaaaccgagaaacgacgtcgactttcaagtcacaattgatcatttaaccttgctgcataaggatgtcaagtccattctatgccgtgtggcaaatgaaaaagtcagatttgcaagattccgcccttttccgttttggaaaagggtgcaggattcctttatcggaaaaggcgaatagaaagaggaaacggattggacaacttttttatccaaaagaacatgactgcccgggatgccggcatgacggttaaagaatatacggcgcagctcggcatttcaaagcggcttctcgctgacattaaattcggcgggggagacctgcttgtgaacggagagcatgtaaccgtccgcaccgtgttagcggagggagacgtgcttaagattgaatttccgaaggagcatgtgagtgaaacgcttttgcctgagccggttccgcttgatattctttatgaagatgaccatgtgcttgtggtcaataaacagccgtatgtctcctcaattccatcaagagaacacccgtcaaaaagcatcgctaacggagtgatcagccactaccgaaaaagcggcgtgcaatcaacggttcatcttgtcacccgccttgacagggacacatcgggggcgatgctcatcgccaaacatcggctttcccattctcttttgtcggcagcacagaaaaaggggcttgtcagcaggcgatatctcgctgtcgtacacgggatcatgctgcagaaggaaggaacggtggacgcgcccatcggaagaaaacacgacagtattattgagcggatggtaacgccggatggacaacgagcggtgacgcattttcaaacggaaaaagcgggacatgcgtttacgcttgcagccctgcggctggaaacggggcggacgcatcaaatccgggtgcacatgagctacctcggccatccgttagtcggtgatacattgtacggcggaaaaaatgagggaattgcccggcaggctcttcacagtgagcggctttcattcgtacaccccatgaccggagaaacgctcgtttttcacgctccggtgcctgacgatatgaaaacattaattgaacacatgtaaagcccgaaccgtttgccggtttcgggctttatttcatgcctgcctgccgtgatcctcgcgaaatcgtgaagcatcatacggcatagagctttccacagagacggtttcatgctcgggaaaacgaaagcctgtcagctgattgccgaagacacagcctgtatcaatgttgaccgtacggttgacgatccgggggcgttttaccggggtatggccgtacacaacccacgccttgccttcatagtcggcagcccagtctcttctgacgggtctgccgtcgggatgcgtttcacccgtaatatcgccgtacagaacaaattcttttaccttacgcgagtatttaccgatatcgtcagcttttatgccggcgtgggcgacaacgagatcgccattatgtaaaatgtcataaagcggcgctgactcatataatcggataaattgtccggagacttccgttctgtcggcgggagacagctctttcagttcggctgccgtcgtttccagtccgtgcatcacttttacagggtttccttttaagtaacgatacagtttgttgcaatgatttcccgggacataacggacggctcctttttcatatgcttttgccacaaaacgcatcacttctacggattttgggcctctgtccgttaaatcccctgcaaagacaagcgtcctgccttcagaatggacgggcgttccgtctttcacttcatatccgagcttttgcattaaggcgatcatttcgtcataacatccgtgtatatcgctgatgatgtcataagccattcgtgtcagcctccttattaacggttttttatttattatggggctaattcctatacctaattacgctgttttggtacaaattaaaaaaagaattgaagaaataaagccttatcacttttttttcgcgttaagccttgttagaatatgcgttatgtttttaaaaaaagtaaggtttcgtccgcttaaagcgggcttttataacccttgttttaaggaggtatttacaaatggaacacacatcagtcgcatctttagtcgtcgttctgatcgtcgcttttttgacgccgctccttttacatcggtttaagctcagcatccccgtcgtcgtcgcggagatcatcatggggcttattatcggaaaaagcggcctgaatcttgtcgttcagggagacacgtggctggagacgctgtctgttctcggctttatctttttaatgtttttaagcggcttggaaattgatttttcttcatttgagaaagggaagaaaaaacaattccttccgaacggcaaggaagcgcccaacacgttttctgccgcgctgattatctttttcggcatctttattttatcattgctgctgtcctatgcctttgtattagccggttttattcaaaacgcatttttaatgacgcttattatttcaacaatatcactcggtgtggtggtcccgactttaaaggaagaacggatcatgaactccaatatcggccagatcatcctgcttgtcgccgttatcgcagacttggctacaatgattctgctcgctttcttctcttctctttacggagaagacagcggaaatatgtggcttctgttgattctctttgccgcgggggtcgtgctgtatttcttcggcaggatctttaaacaccgttcatttgtgcagtcgatgtctaaaggcactgtgcagatcggcacgagagccattttcacactgattatcgtgcttgtcgctttatcggaatctctcggggcggaaaatattctcggcgcgtttttggcaggcgttctggtatcgcttctgtctccgaataaagaaatggtggaacagctggattccttcggctacgggtttttaattccgatctttttcgtcatggtcggggtgaaattggatatttggacgcttttccaagatccgaaaacattaacgatgattccgctgcttctgcttgcgctgtttatcagcaaaatgttcccggtgttttatttaaagaaatggtacgacaaaagaaccgtgtttgcttcgggctttttgctgacgtccacgctgtcgcttgttatcgcggcggctacgatcggagaaaggctccacattatcagcgccaatatgtccggcgcgctgactttagttgcggttattgccagcatcatcacgccgatcggctttaagaaattattcaaacggcaaagcgcgccgcaggaaaaaaagcgcattacatttatcggcgccaaccaaatgacgctcccggttacgctggaattgcctgaggaggaatatgaagtacgggtcgtccatgtgtatcaggaaaatgccggggaaacgcttgcggaatccgttttttcggttgacacgatttctgattacgagcccggcacgcttgagtcgcacggtattttcaaaacggatattcttgtcgtggcgacgggaaatgaagatgtgaacgctgaaatcgccttactagcgaaagagaaagggactgagcgtatcatcgcaagcgtcggctcggttgagcatgaaacaaaactgaaagaagagggcatcagtattttttctatccttctgtctacaaaaacgctgctgcgcgcgttaattgaggcgccgggcgtgatgagcctcctgacgaatgaggagtcttcgttatatcagatcaatctggaaaacccggcgtataacggcatcattctgcgggaatttccgctgatgggcgatgtgattttcgtccggattttcagaggtgtggacagcatcgttccgcacggagacacacggctgaaaacaggagaccgtctcatcgtcacaggctcgcgcaactacgtgtcagaactgagaaaaatccttgaagcttgaccaaattgcaattcgtgataatatagaaggcataacaaataaatcattaatcgtatgaccactaggggtgtccttcataagggctgagataaaagtgagacttttagaccctcataacttgaacaggttcagacctgcgtagggaagtggagcggtatttttttggggttccttttatccatttaaattccaaaccacttttccgatgcgggaaagtggtttttttattttatcagggggaagacatgatgacattttctgaagaatgcagacaggcggctgccgaatggtgggacggaagttttgttcatccgtttgtaacgggaatcggtgacggaagcctgccgatagaccgtttcagctattacgtgctgcaagattcctactatttgacgcattttgcaaaagttcaggcgttcggcgccgcatatgccgaagacttgtttacgacgggcaggatggcgggccacgctcaagggacatatgaagcggaaatggcgctgcaccgcgagtttacggagcttttaggaattacggaagaagagcgtgcagcatttaaaccggcaccgaccgcctattcttatacgtctcatatgtacaggtcggtgatgagcggcaattttggagaaatattagctgcgcttctgccttgttattggctttattatgaagtcggcgaacacctaaaagagtgcaaaccggagcatccgatttatgaaaaatggatcggtacatacggcggagactggttcagacagcaggtcgaagaacagatcagccgttttgacgagattgctgaaaacagcacagaggaaatccgcgcgaaaatgaaagagaattttgtgatttcaagctattatgaatatcaattttggggaatggcttatcaaaaagaaggctggtccgagaaggacggaaaagaggtggaatcctttggagctgcacgcggtaactgataatcgcaaacccgttgccgagctggccgaggatattctatcgattcagcgcgaagtaagctttatccatatccgtgagcgggataaaacagcgggagagatcatgcagcttttgtcccttttgaaaaagggcggtgcggataaggacaaattgatcatcaatgacagggcggatatcgcgctttttgccaacatacaccgtgttcagcttccgtcccgcagcttttccgtaaagcaggtgcgaagcagatttccccatcttcatatcggacgttcggttcattcgctggaagaagccatccaagctgaaaaggaagatgcggattatgtggtgttcggccatatatttgaaaccgaatgtaaacaaggacttgaagcaagaggcatcagcctgctttcagagatcaaacgcacgctttccatccccgttatcgcaatcggcggaatgacactgcagacgatcggacacacaaagcaggcgaagccggacggaattgccgtcatgtcaggcattttctcagctgaaaatcccgaggaggcggcaaaacggtatgcacgtgcggtaagggaggccgattatgaagcagcactatgatacggcggtgatcggcggcggaattatcgggtgtgccatttcttatgagctggcgaagacgcagcagaacgttgtcttgtttgaagccggagaagtcggccgaaaaacgacaagcgctgccgcgggaatgctgggtgctcatgcggaatgtgaaaaccgggatgcgttttttaattttgccatgcacagtcaaaggctgtatgaagcggcggggcaagagcttgaggaagctagcggcattgacatcaggcgccataacggcggaatgcttaaactggcgtataccgaagaagatatcgcccgtttacggaagatggatgatctgccttccgtcacttggctttcagcggaagatgcccttgaaaaagagccttacgcttcaaaagacattctcggcgcaagtcttataaaagacgatgtccatgtcgaaccgtactatgtttgcaaagcgtatgcaaaaggagcgcggcgctatggcgctgacatatatgagcacacacaagtcacttccgtaaaacgggtgaacggagaatattgcatcacaacgtccggcggggatgtttatgctgacaaagtcgcagttgcaagcggtgtatggagcggccggtttttcagccggctcggcttgggacagcctttttttcctgtgaaaggagaatgcctttccgtgtggaatgacgataccccgctgaccaaaaccctttaccatgatcattgttatgtcgtcccgagaaaaagcggccggcttgtcatcggcgccacgatgaaacagggcgactggagcgatacgcctgacatcggaggaattgaggccgtcattgcaaaagcgaaaaccatgcttcccgccatcgaacatatgaaaatagaccggttttgggcggggctcaggccgggaacaagagacggcaagccgtttatcgggcaacaccctgaagacagcggcatcatcttcgccgccggccattttcggaacggcatcctgttggcgccggcaacggctgaaatggtgcgggatatgatcatggaaagacagattaaacaggaatgggaagaagcgtttcgaatcgatcgcaaggaggctgttcatatatgatccttcagctgaacggaaaacaaattgattggaatcgaaaagaggggacggttcaggatttgcttgaatcgtaccagcttgaccaaagaatcgtagttgtggagagaaataaagaaatcattgaaaaaaagaattatgaaaatacaagtttgtgtgaccgcgatgtcatagaaattgtccattttgtaggaggcggatgaggatgttaacaataggcggaaaacagtttcggtcaagattgctgttaggaacgggaaaatatccgagttttgagattcagaaagaggcggtggccgtctcggaatcagatattttaacctttgcggtgcggcggatgaacatctttgaagagtctcagcctaactttctcgaacagcttgatttgtctaaatacacgcttctgccgaatacggccggcgccgcaacggctgaagaggcggtccgaatcgcaaggcttgccaaagcttcagggctttgtgacatgataaaagtagaagtcatcggatgcagccggtcacttttgcctgatccggttgaaacgctgaaagcatcagaacagctgctcgaagagggatttatcgtgcttccgtatacgtcggatgatgtcgtgctcgcaagacgtcttgaggagctcggggtgcatgccattatgccgggcgcttcgccgatcggttccggtcagggaattttaaatccgctgaatctttcttttatcattgaacaggcgaaggtgccggtcattgtcgatgccggcgtcggatcttcaaaagacgccgcctacgcgatggagctcggggctgacggcgtgctgttaaataccgctgtgtcaggcgcagatgatccggtcaaaatggccagggcgatgaagcttgccgtagaagcgggccgtctttcttatgaagccgggagaattccggtgaaagattacggaactgcaagcagtccgcgagacggtcttccggtatgacggacagatattccagacaggagctgtttcagccgatcggtcccaccggccaagagaagctccggtcgtctcatgccgtgattatcggcgcgggtgcgcttgggacggcaagtgcggagatgcttgtcagagcaggggtcgggaaggtaacgatcgctgacagagattatgtggagtggagtaatctccagcgccagcagctttataccgaagacgatgtcagacaggaaatgccgaaagccgcggcggctgaaaaacggcttcggtctataaatagcgatgtagaggtcgagggatttgtcatggatgtcactgcggaaaacgcacccggattgattcgtgatgcctccctcatcgtggatgccgccgacaactttgaaacgaggctgattgtgaatgatgcggctgtgcagaaaggaattccctttctgtacggcgcctgtgtcggcagctacgggctctcttttaccgtcattcccggtgtcacgccgtgccttcactgtctgcttgagacattgcctttaggcggtatgacatgcgatacggcgggaatcatcagcccggctgtattgcagacggccgtttttcaggcagcagatgcgctgaagctgttaacgggcggatctatcgagcatgttctccgttcctttgatttatggaaaaatgaacggtcagaaataaacgtcgcccgtcttaagtcggctgattgcccaagctgcggcacaaacgattttccgtttttatcctatgaaaatcagacaaaagcggcggttctgtgcgggcggaacacggtgcagatcagaacggggatttccgaacagtttgatctgcaaaatcttgcgggacagctcagacgggcagggcttgatgtttcagccaacccgtatttaatttcattttgcacagacaatttcaagatggtactgtttcgtgacggcagagcattaatacacggcacaagtgatatcagcagagcgaaatctttttatcataaatggatcggataatgtgaaaggagcgaaaaacatcatgagcatatgcaaagcattgacgattgccggatcagattcaggaggcggcgccggtatacaggcggatctcaaaacctttcaggagctcggcgttttcgggatgtcagcccttacagcggtaaccgcccagaacacgttgggcgttcacggcatttatccgctcacccgggaggcgctgggcagccagattgacgcggtggcggaagatttgcggcctgatgctgtaaaaacaggaatgctgtggagcgcggaaatgattgcggaaattgcggaaaaaacggatcagtacgggcttgatcatctcatcaccgatcccgtcatgattgccaaaggaggcgcttccctgctgcgtgaggaatctcaggccgcgttaaaagagctgttaattccgcgcagctatgcggtgacgccgaatgttccggaagctgaggtattgacggggatggaaatccgcacgtttgaggaccggaaaaaagcggccgaacgcctttgcaagcttggggcaaagcatgtcatcataaaaggcggacatcagcctgaacaggggagaatcgttgatttattatttgacggttcgtcttttacccaaatcagccacgcttatattgacacgaaacacacccacggaacaggctgcacgttcgcagccgcgctgacggcagaaacggcaaaggggaaaaacattcagaccgcgtttgagacagctgtcaattttgtgcgggaagccgtggaacatacactcggcatcggagcgggacacggcccgaccaatcattttgcctttaaaaggaacagtctgcagacgagataaaaaagagaccgcttcaacatccgcggtctttttcccatgctttcaatctggacaaggttatgatatgataaaaattaagatcaggtactaaaactatgtctttaagacgattacaggaggctttatacatatgaatttctcacttgaaggccgcaacatcgttgtgatgggcgttgccaataaacgcagtatcgcatggggaatcgcccgttcgctgcatgaagccggagcgcgcctcattttcacttacgcgggagagcgcttggaaaaatcagttcatgaccttgcggctacattagaaagaaatgattccatcatccttccgtgtgatgtgacaaatgacgctgagatcgaaacttgctttgcaagcattaaagagcaggtcggcgtgattcacggcatcgcgcactgcatcgcgttcgcaaacaaagaagagcttgtcggcgaatatttaaatacgaaccgcgaaggattcctgcttgcgcataacatcagttcttactctctgacagcggtcgcaaaagcggcgcgtccgattatgactgaaggcggaagcatcgttacactcacttacctcggcggagagcgcgtcgtttcaaactataacgtaatgggtgtggcaaaagcgtctcttgatgcgagcgtgagatatttagccgctgacttaggaaaagaaaacatccgcgtcaacagcatttcagcagggccgatccgtacgctgtctgcaaaaggaatcagtgatttcaactctatcctgaaagaaattgaagagcgcgcgccgctgcgccgcacgacaacacctgaagaagtgggcgacacggctgcattcttgttcagtgacctgtcaagaggcatcacgggcgaaaatcttcacgtggattcaggattccatattaccgcacgttaaataacaagcagtccctttcagggattgcttttttctttcttctgattttaatcattccgtcatataaataaaacatgacagaatcggagggatgaagatgtcaaaacaaaacagaaacgcggaaaaaaaaccgctcatgtatattgttcaggcggattattcagacacgcaatcatcaatgcaggacatattaatcaaaaaaaggaaagcgccgcagccgccggaagaagagccgatgcatggaaagcgggaggaagaatgtaaaactcagcctgaaggagcagtggctgtcgaaccagaaaagcaagtacctgaacagcacagccgctcagaagaagccgttcaagaagttccggcgcaagcggagcaggacactgccaagcctgaagccgctaaaaaagagcctgaagccgctgaaaaagagcctgaagcggttcacaatgccgccccagaggaaaaggtcccgccaaagcgcgtgaaaaagccgatgagcagaatgtccattcttgaaaaaattgatttcttaacgaagctgccgcataatatgccgcggaccctttgtctgatagaagccaacgggaaaacctacagaggcgtaatcgtcggaagaaaaaataatgcgatcttcctgcggacgacaagcaacggagcgccggcagaactcgcaatagacgatattacctcgctgcatccgcttggattttaaccatacaaaaagctgcctgaattctttaatccggcagcttatttttatgctttttgatttaagaatgtgtgcggttgatcagtctcgggttcaggcaattgatggcgcagaagctatggagatcgacttcaacgcaatagttcgttttttctaaacggaatacatcgcagagagagtctttatctgtaaaatcaagaatgtgcttatgctcgtcaaaagcaataagcaggcttaatgtggcacagccgtcacagaccctttcaactctgaaaaaaacggtgttaaaacacggaccgttatccagctcgccgacatttccgaatgcggtaaacggtgatgatttagaagtgaaaagtacaaacggcactgtatcgcctaatgaaaaacccggcgataaaaggttggaatagcatccggccgggcaatcttcctcgaccgcattttgcaggtcttcaatattttctaccgcttcacgcacacagtatgttgtatgcttgctcataatatccctcctgacttcacgttttatataccggattaaacgatatcggagagtcagccgcccggaagtccgggcgggctgatgattgcatctgtaatagaaggttggaaggggattcttctttaggaaagatgcgaatcaatgactatccgtgatgctttttctctttgtgcggctcaggccggtcaacaagctccggtgaaaggcattgaatggcgctgaagcagctcagatcaacttcaatgcaaaaatctgttttttctaaaccgaagaaatccgggtcacaaggatggcagacgctgagggtgtcgccgtgcacatctacggggcgcaatactgaaagcgttgcgcagcaatcacaaactctttctgcccggaagaaaatagactcgaagcactggctgtcatccgcaaatcctccgacgttcccgaatgtggagaacaaaccgccttttttatcaaacaagagaaacgggatggtatctttaccggtaaccgtcgggcttaacagattggtatagcatccagtcgggcattgttcttcaacagcctcttgttctgctaaaatcttctcgactgcatcgcatacacaactttcatctcggccatggtgttttccgcagctcatggatttcagctccttcttttagggtatttgacttttgtctttaacaacatatgtacgcgagcctcacttggtgtgggtgaacgtctatatattcatcatatgcggagaaaataagaaaaagcagagcatttttagctctgctttttctttttagaggacaagggtgatgactaagacggcaatcagtaaatttgtcgctgttgagatcaacactgcgatatcggcatctactgttgtcacgtttacgccgcgggagttttcgatgagcaatttttgacggttgatttgtttgttagctgttagctgcaataagtcttgtgcgaccaattcagcgatgactccgtcagcaattgaagtgagagtggccgttacgactgctgcattaatcgctgtcatgactgaagcgactgcttgaacgtctgttgacgttacgttaatatcacaagagtctctgataataatcgcttcttcagaaacttgtttgttgatattcgcctgagccaggtcttggtcaaggaaggcattatcttcgccaaatccatgtccgttacagcaaacactgcatcttcttccttctttttcttctttttcttctcgcggatgttcgcattcaggatcaagtgcaacccaagagtatggtctgctttccatatctattcctccttttcttttactattattaaatgagccggccccttattttgactcaggcatctatcctgataaaaatcactattttttagttattgaccgggattttggcgtctttgccggagctgttcgattaattgttctctgcgggtttgcggatttgtctgctgttcttgcgctttttcctgctcttttttctgtttctggctttcaagaaaagcttctgttttcgcctgcatgtctttgactaatgcgatcagcatttctttttcttcatcagggatttcccgcattttatcctttgtcacgccgtgttttttgaagacattgctgacaagcacctttaaaagcggatccacttctggtagattttcgagttctttttttaatttttcgttatctgccatttgttctcacctctatttaaatatttgaaaagaaaggttaaaggatgtctagttcagcaaaaagtatatttaataattgaaacaaaatttgtacaaaggccatgatatcgtctgctgtcagtgtgattttaatattgcggctgttcaggacttgaatgacggtcctcttttttatttggcaatcatccaggatcagcagttcggttgcgatttggtcggctgtgtcttcatctgcgatcgcgagctgtgtcgcgaggataatcgccgtagtaactgaggcttgtatagaaagagcggccgttatatgtgttgtatctattgtgacattttcgcaatcaatcacttcgatcgtctgctcgaattcgttggataattgttcgtatatttgcggttgcagtgtttcgactttttcttcaaacgacataaccttcactcctttctcattcatactctatataatgcaaatgaaacgccgagcggaataagaaaaacaactaaaccgcacctatttttttaccggacaaggtgcgattcatgaagatcagggttttcgcatatgtataaagaggtcaagttttgaaaaggagtgaacaggtggttatcaattggctttcatttattctgttatcgtttgccgttttccggctggccaggcttttcgtatttgacaccattatggcgccgcttcggagcctttttcacgaggaaaaaacagaaaccgcacccgacggcacgacagaaacctacattgtcataaaaggaaaaggcatcagggcatttatcggtgaacttctcagctgctattggtgtacgggcgtatggtgcgccgcctttttaattgcggcgcagattgtgatccccgaggctgcgcaatggctgattttgctgttagccatagccggcgcggccgggatcattgaagctgcggtttctcgtcttctgcaggaataaggcggttccaccagcaacttaccgtcactttcggcataaactggcatatatgacataaggaaaggaaggatcaccatgaatcaatcaagcaaaccttcccaacactctccatacaaatcaactgtgcatcagccttacgaaaaaaaaattaagaaaaaaggctgcggctgcggccaaaagaaaaaaccgaaatagccgttttcaaaaaaaaccggagcttccggtttttttgttttttgccgaacgccggcctctgcccggcatagatcataggaggaggggatgttatgaatatatttgaatcattcataaacggtaaataccgccggcacaatcaaaatcagcgggagcatgacaactatatcttatctattgaaaaacagctgtctgagtttgatgaagcgggagcgcgctttgaggaatggatagatgtgtttgccgccgaaacagaagcgaaactgaagaaaaatgagcattctcaataaaatgaaaagaaatccgcaccggccctatgcatttatccaagccaaacaagtcggctcacatagagtatagagagtaaaggaggtgcttaaatatgggattcggatatggcggattcggcggcggctacggcggttacggctgcggcggcggctgcggatacggaggcggctatgtcggaggcggatacggctcaacatttgttcttgttgtcgtattgttcatccttctgatcattgtcggtgcatccttttttggctaaaccttagcaagactttggataagcgcgggaccgttcagtcccgtgcttccctaatgtatgaaggatagagaaggagatgcggaattttttccttgtcttacgggcacacgttccgccctttattcatacaatatcgtattactccacaaaaggaggcacaccatggataatcaattttttaaaaatattgagaagaaaacaggcgtcagcatgaaggatgtcatgaaccttgcaggatcattgcaaaatgccaatttcaaagatgaaaacacggtgagaggcgtcattcagaaggtgtcccagctggctaacaagcgtgttccgaaagaattggaagacaaaatcgttcaatcgattacaagcggtaaagagaaacttgattttggcaccatttctaaaatgttaaacaataaataggcgtcagccggccttgctaaaaaggcctttttatgtgagaagaacccggcagtgatctgccgggttctttatatcctgagtgcgctccgtctgtccgtccgaagaaggggctcgagaaatcttgagctgcgcgctgtttttccccgcctgtacgcgggacaagatacatataaatgctgcatggcccttgtcatggcgacatacaggagccgtctttcttcttcgagcggagcgggatcgccctgtctcgctgtctcaagcgcgaagtcatggggtatcgagccgtcagccgcgcctaaaatatagactgtattgaattcaagacctttagagcggtgaatggtcagcagttcgacgccgttttcatcggttttctgattctcagcggcgcgcatatgatcgacatgcgcaagaaaatcgggaatggttttgaattttttggcggccactttgacatccctgagatcatcagagcctttttccagtttgtttccctcattgccccgtttttttaaatactcggaaaaacccattttgctttctgcaaaggtgatggcttcaacgggcttcattgtccggatgcttgcgaaaaacggaacgatctgcttgatctttcctatttgaaaaggcttcaggtcaggcagtttcgtcagtgccttaatcatcgtgcaatcttccgtgattgacagcgcctttaacgtttgcagggcggattgctttaaaaataaggcgggcagcagatctttcaccgcatccgtatcatcttcattctgactcgcatataagtaggcgaggatctggcgtacgattctgcggctgtagaacgtctgcacgccacggtcggcatgataaggaatcgatgattggtgcagtctttcataaatggcccgtccggcgctgtttgtccggtaaagcacggcaaaatcatcaggactcgccccgttttgaattttctctttcatatccgaaacgatcatggtcgcttcttcttcttcatcgtaaggataaaacatcacgggattgtgaacgccgtctttgacggcagaaagtgttttttcataccgttttttatttttctttacgacggcatgagcgcttgagacgatcggatgcggcgagcggtaatttgccgttaagtaaatggtctttgctgccggataatccttttgaaaatcaagaatgaaagacgggctgctgccgcggaacgcataaatggattggtcgtcatcacccacgcagcacaggttattctccgggcttgcgatcatttgcataatgttgtactggacaggattaatatcttgaaactcatcaatcaaaatatgagaaaatctgttttggtactgcgcgagaatatcaggccggctttgaaacagttcataacagccttgggccatgtcatcaaaatcaaattgccgtttttcccgcttctgccgttcgtaatgttcgtagagccggtacacttttttctcccagtcgtccgcaagcggaatggtctcatgggggagatacgtgtttttccagcagccgataagctgcagcgcctggtcgacgggaaactctttttcatccaaattttcttcatagagcgcctttttcacatattgctctttttgccactccatttttaaaagctggctgccgttccattttgaagaatcataatgatagagtattttatagaaaaaactgtggaatgttccggtcacgagacgggagacttttccggctgccagcccgtactcattcgccatccgctctttcatttcggcgacggcttttgtcgtaaaggtcacaagcagcatattctcaggtgaaatgccgaggtgttcaatcatatgggcggcgcgggctgtcagcacccttgtttttccgcttcccgctccggcaagcaccagcagggggccgtccgtttccgtgactgcccgcatctgttcgcggttcaggccgatgccggggaacaaagatgtatcagctgcctcggatgttggtgaaaacggttcggccgcaggcacttttttcgggcttttccattctgagacgatcggtttcggattctctgaaatcgcttttcctttcggcaggcggaacatgcctgcctccttatactcttctttttctttctccgcttgtggttcctcggcggcgcatgctttttcacaggcggtgaagtctcccttttgccggtgataaaatgccggctgctctaaaatcgaaagccgcatcaagacaggctggtcacaatgtgcgcaaaaaatatttcctttctgagcttcttcaaaaaggaattggtaatgttctctagaatatgtatgtaaatgtatcgttcggttattcagtcgggcgcatttcaaaaaggggtcctcccattaaaaggtgttcatccatttgatagacaaagaatatcataacaaaagaaccgcgtttcaaaaagtaagattaagggaaatgaaaagcgaaggggaggggtacatatgatttatgcaggacggattcaaaaccagcagtattctcaatacgcaaaccgggcagcgggttataagcctgattacgccggcattacgaaagcggccgccctcgccaatgacagggtgtacagagaggtggagcgccgccaggaaaacaccgcagccgcagaaaagaaaatgcatgaggaaaaacgtaagcgctctctttcccgtctgccgcaaattatgggaaaaggccggttgataaatcaatatgtgtgaaaaagcccggaaatctccgggtttttttgagccgtatatatgaaagatgcggaaaggaatgattcaatttgagaaagctttcattattaattgcggggttatttctattcggcctctttactgccggaatgaaaccggcacacgcggcggagagctccgcagcaaaagatgtcactctcacacagctggcgccgcatgtctggatgcatacaagcatcggtacggcagacggaagtcccgtccctgcgaacggattgcttcttgaaacttccaaaggaatcgtactgattgatactccgtggaatgacagtctcacagagcaattaatgacacaaataaaacagcggtttcccggcaaaaggatgaccgatgccattgtgacacacgcccatgacgatcgcatcggcgggctgaacacactgtacaaatacggtgtaaaggtgcacagcacgaagctgaccgccgacttcgcccggcagcagggatatgaccggccgctcggagatttgaaaaacgtgacaaagctgcagtttggcgatatgaaaattgaaacgttttatccgggaaaagggcatacggaagacaatattaccgtctggctgcctgaggataagctcttattcggcggttgcttaatcaaggctttagaaacaaaggaaatcataccaactccgggcttttatccggatcagtggccgcgcgccgtccgcaaagtcatgaaaagatatcaggacatcagcattgtcgttccgggccatggcagtccgggggatgaccgtctgctgccgcatacgataagccttctgaaagaaacgtaaaaaagaagaccggcgctcccattacggagtgccggcttttttaactcttcctgatttttataaaactgaggaaagcaagtgcaagcgccaaaacggtatatcccgctatcggccaaatatgctgatgaaaggaagaataatctccggatatgacttcctgagccagctcgatcgagtggataaacggtaaggcataagcgatatgtttgaatgtgtcaccgagcaggctcacctccatccaagccccgcccagaaattgcacgagtgtaatataaatcgttccgatacctgaaatttgtttgtccgtaaacacagcccctaaacataaaccgaagaaaacggacatcatcgcaatcggcagcaagacagcgatacctgcgagaagattcatccactcggcggataaaccggcagcagcagctgcgataaaacaaatgacgatttgtaaaatggctaacggaagcatcggcagtgcgtaaccgatgacataatcggctgtttttaaaggggaagcaaacaaacgggtcaaaagggcggtctgtttgtcttttgcgatcagcaatgcagagaacatcgtaaggaaagcgaaaccgaaaacaatgagtccgggtgctaaatgctgaattttaaaggtatcaagcggcgcatttttttcaatcgccgtaaacagaaacaatagaataacaggcagtgcgattccaaggatgatagataagggatcacgaaaaatctctttgcggttgcgaatggcgaaatcaagcataaagacccgcctctccgtcacaaatcgctaaaaaggcatcttcaaatgtggctgaatgagtttgttttttcagatcctccgccgtgcccagtgcttttaatgtcccattttctaaaatgcaaatacggtctgccagtgcttcagcctcttctaaatagtgtgtcgttaaaataatcgtcatgtctccctttaatgtctcaagatttttccacaactcgcggcgtgaacggacgtccagccctaatgtcggctcatctaagaaataaatatccggtttcgtaatcatgcccattgcgatgctgaggcggcgctgcattcctcctgataaggttttggtttttgctctttctttctcttttaattgaaacaattcgagcatctcatctgttcttttttttgcttcttttttcggaattccgtagactccggctataaactctaagttttcccgtacggttagatgaggagcgatggctgtttcctgcggggacatattcaatttcggttttattttatccaaatcagtcgaaatactgtgtccaagcactgatgcatcaccttcatccggagaaaggagtccgcaaagcatattgattaatgtcgtttttccggctccgttctcaccgagtaaagcgaaaaattcccctttctcaactgagaactcaagacggtcaacggcggcggtttctttataatgtttcgttaattgcttcagctcaatcgcgtgcatttactcatcctcgctatctgcgtcgatttgcttagcgtttaaaatatcttttgcaaactcgaaaaagagttcttgtttaacaagtgcgataccttgctggtcatccccaagcataagcagtgaatcccccggatttatatcgaaaacatctcttgcttctttaggaatgacaatctgtccttttgtgcccactttaacagtcccgaatatgtgttttccttttggtgccgtcatgtttatccctccgaaatatgaattgtattttttgtatgaattgtaatacttcgtatactaaacatacattaaccttccataaaatgcaataaaattcatgaaacggtattgttttcataaaaaaagcactcctgccatatcaacaggagtgcttttgtttttattgtttgtattcctttatcatttccagatgggggatgcccgcatcgagaaattcttcgccggatgtgacgcggtatccttgtttttcgtaaaacgggaccgcctgcgtctgcgcatgtaagataaagctgccggcgcccttggctgccgccgctttttcaagcgcctgcattatgatggctccgacgcctaaagaacgatggcttttcattacgcagatgcgctctaattttccatgcccgtctttcaagcgccatctgccggctccgaccggctggccgccgtcatatatgactatatgctctgacgtgtcttcgaattgatcaatctcttcttcttccggaacgtgctgttctttaacaaagacctcttttctgacgaaaaaagcgtcgttcagctgtttttcagtttttacgatgatggattccaagcagttattctcctccgcctaataaaaatgtttcgtacacagtccatgagccgttatccagctgatagagcaggtgaaaacggtcgatgacttcttcgtgggaaatgtcttgcattttcagctgtccgagtacgtcggaatgttcatctgacgacagcttctggccgaccgtgacatgcggaacgaagctgtattccggctcgccggataatgctcctgagtagcatttctcactcagagattttaattcctccgtcggctctgctttcatatatatcacattattcacaggagaaaacgagctgtattttgtgattttcagaacgagcggatgcgactctttcgccgtctgtctcagctgtgatacgacctgctcgatttcctgttctgtcgcttcaaacggatctcttaccgtcagatgcggcggaatgagcgcgtagctcgggtcgtagcgtttccggtacgaatttgcgagatcctgtaatttttttgatggaaataaaacaataccgtatttcatgaaagttccctccttaaatgaatggttacagcatttttttcagcgccggcgtgatgagcggctgccagtaggtccatttatgatccccgtcgaaggtttcatacgtgtattcagactgtttgctttccagcagctgtttgagctcttcgttcggcgcggtgaaatcaagaacctggccgtccgtcgtgtgaacgccggtttctttttctccgatttgatgataaacggaaatctgtttgagatcctccgactgccggacggcatccagcacgtgcccgtcaacatacggagactgcatgatgacgtttccaaacatattcggatagtcaatcgccgtcatgagcgaaacggttccgccgagggaatccccgatcatggtgcggccgtatccgacttgataagtcgggtattctttgtcgataaaaggaacgagctcattggcgataaaccgcttatatgaggcgaacttagagccttctggatggtatgtgtttcttcgctcccgcacatttttataagggacgccgataatgatgcagcggtcaatttccccttttgacataagctcttccgcctgacgcccgattctccctaatctgaaataatcatggccgtcctgagcgatgaccgtatgatatttatacaggggggagaaggtggcgggcaggtagaccaaaacggtcatttcctcttcaagctcatgggagaaaagtgttttctcatgaatgattccgttttttgatgccacttcgcattcctccaggccgcttcttgtcttgatggttttttcctattgtaccatgaattattagaaatttctttcttcagatgcacttcttgcgagagttcagataaataaaaagttgttgaaatctattttatagtgcgttaatatagaacaatcagaaaatacaaaacaatattcttatcacgagaggtggagggactggccctttgaaacctcagcaaccggtttgctttgccgcgggaaggcaaagtgccaaggtgctaaatccagcaagcgattcacgcttggaagataagaggaagagaaaagctccttcttcttatgaagagggggcttttttatttttgaaaaaggatggtgcttactgatgacgcagcatgttgaaacaaaattagcccaaatcggaaatagaagcgaagaagcaacgggaacggtcagtccgccgatttatctgtccaccgcttaccgccatagaggaataggagaatctacaggttttgattacgtgcgcacgaaaaacccgacacgccagctcgtcgaagacgccatcgccgtgttggaaaacggtgcgagaggatttgctttcagctcgggaatggcagccattcaaaccattatggctttatttaaaagcggggatgaattgattgtatcctccgatttatatggaggcacgtaccgtttgtttgaaaacgaatggagaaaatacggcttaagctttatttacgatgatttcagcgatgaagactgtttacgctccaaaataacggaaaacacgaaagcgctatttgttgaaacaccgacaaacccgttaatgcaggaggcggacattgaaaaaatcgcccggattacgaaagaagccggcctgcttttgattgtggataatacgttttataccccggtcatccagcgtccgcttgaactgggagcggacatcgtcattcacagcgccacaaaatatttagcggggcacaatgacctccttgccggtctggctgtcgttaaggatgaagagctcggcgacatcatgtttaatcaccaaaatgcgatcggcgccgttctcccgccgtttgattcgtggcttttaatgagagggatgaaaacactcggactcagaatgcgccgtcatgaagaaaacgcccttgaacttgcagaatttttagaacaggaagaggaaatcgccgacgtgttatatcccggaaaaggcggaatgctgtctttccggctgcaaaaagaagaatgggtcaatccgtttttaaaggcgctgaaaacgatctgtttcgcagaaagtctcggcggggtggaaagttttattacataccccgcgacacagacgcacatggacattccggaagatatccgtatcgcaaacggcgtctgcaaccgtctgctgcgtttttcagtgggcattgaacatgcagaagatttgaagcgggatgtaaagcaggcattacagcaagtaaaagagggggccgtgtcatatgagtaatcacaattggacgctggaaacccagctcgtgcacaatccatttaaaacagacggagccaccggagccgtcagcgtcccgatccagcatgcttccacattccatcagtcttcatttgaagaattcgggacatatgactacagccgatcaggcacaccgacaagaacagcgcttgaagaaacgatcgcaggtcttgaaggcggaacgagaggttttgctttcagctccggtatggcggcgatttcgacggcgtttctgctcttatcccaaggcgaccatgttctcgtcacggaggatgtgtacggcggaacattccgcatggtgactgaggttctgtcccgtttcggaatcgaacatacctttgtcgatatgacggacacagaagcggtcgcctgcgccatccggccgaacacgaaagccatttatatggaaacaccgtcaaacccgacgctcggcatcacggatattaagggcgtcgtcaaactggcaaaggaacacggctgtctgacataccttgacaatacattcatgacgcctgctctgcagcgtccgcttgatctcggtgtagatatcgtgcttcacagcgcgacgaaatttttaagcggccacagtgacgtgctgtcaggccttgccgccgtaaaagatgaagagctcggcaatcagctgtataagctgcaaaactcgtttggagcggtgctcggtgttcaggactgctggctcgtattgagaggcttaaaaacattgcaggtcagactggaaaaagcgagccggacggctgagcggctggctgcctattttgacgggcatcccgcaatcaaaaacgtttactatcccggccttgccggacacccgggagccgatacccataaacgtcaagcgagcggagcgggcgccgtcctgtcctttgaattggaaagcaaagaagccgtcaaaaagctggtcgaaaacgtatcgcttccggtatttgccgtcagcctcggcgctgtcgagtccattctctcataccctgcagccatgtcgcatgccgccatgccgaaatcagagagggaaaaacgcggcatcacagacggccttctgcgcctgagcgtcggagtcgaaaacgccgaagatttagaacgcgacttcgaacaggcattgaaaaaaataacccccgcccaagtgagatcataaacgaaaagggtgccgtcaattttgcgacgcgcccttttttattttagataaaaaaagtgttgacgaatgagaaatcaggatatataattataaatgtcagagagacaacaacatacccagcaacacatacatatcatgattccgtagctcagctgggagagcgctaccttgacagggtagaggtcgctggttcgagcccagtcggaatcatagccaaaacccttgcgttgcaagggttttttactttgcttatttattgattttgtcatcattcatcgagttggggacgaattggggacggaactgcttttttgggccgattttgaagtacattcgctgtatacttcaagggaggtgaacatcgcctttaaggcggcggtctttgccgaaacctgttcattacagagaaatacagaaattccgtatcactgaacggctaaagtgataacgatcagcagctggttaatcctgctgtttttttgtatttgaaaaacggaatatttagttttgtatgaaaaatacagcgaaaatctggaaatcattcacagcacaggaaatgacgcatgcagccgctaatgaaatcagttatatgaccggtagcagtgaatcgactagatatcattttgccgtcgatgataaagaagtgatacagggggccctccatcctaaggcaagaaatcatacttccccttgctttccggttttttaagtcaaaagcccattaaaacccgaggggagagcgtaaaacagattcgaacggcgctgtcggccctttattaaagcggaagaacttcgggattgatggagcatatggagcgaaaacagcgaatgcagtaattcgatttcaattggtgaatggattaaaagctgatggaatttatgcgcttgaaccaaagcaaaacttgaagtgttgttaaaataagcggagactctttccttttttacagactctctcccacactgaacaagaagggttgtgttaaagcaaaatctaagaaattaaatccaaaaagattgcaatgacaagcttctaaagagatgaaaaatatcgggatatcaactaaggcgcaaaatgcaataaaacaggagcttgaaaaaagaaaagaaaaaacaaagagaaaaaataaaggaacaagaatatttaatcagaaaacaaaaagcaaaagaaaagcataggggcaaatagttggagaacccgctgaagcacttcgattgaaaagttgagcggcatcagttttttgcttcggactgatttagagaaaaagaagtataagtcagagcccttctcaagatgaggagggtttttttgcaatttatttaaattcacttacatcagtaaatgcggctgaacgattcagtacgattcagctcatgtatggtttgaagccagacggaatttgcggaccaaaaacgaaagcgaaattgaattaataaaagaagcccttcttaaaagagggctctttttctaactatgttgtttaagatgctttttaatttgttcagtgacttgcttaagccattctaatggagttatatcatcttcaggaaagtatataccatccgctgcttcctctataaattcattcttgtcttcttctgaataatcactatttacaaactcagttagtgctattaaatctctttcttttagtttttgtgatgcttcatttaaatattcatcaagtgcattttccggagactctatatcttggtgaaaatgtccgccgagaaatctaaatacaggatcagaaactttaatttcaatcattatatatcacctcgttgggtagcctgttagtataaagctaccatctttatttttctttaatactattctagcattagtcatatctttaacttcatttgaacctttacgaactcctctacctataacttcggttcctctataaggtaacggtaatggatcgttaacatcactttttaaccactcttcaatttcctttttatgtttagttaatgtttcattagcgactctttctgcagttggcctatcagtgaaactagaagaggcacgtatcttcttgtttatctgtagcctctgtaataactcttcatcagtcttcccaacatgcctttctagaaggtgtccgccttttgcttcgtgagcagctaagccaccgcctggtgcgagaggactgctgtctccttgtttaacactatgtatgccgttattgtcagaagtcacagatttactgagcacactctctttctgatcttcaataatacttttcaacaaaggagtattcttcacattgtgagtattttcaatatcctgtgctattccggcaagcgcgggttggtacttatttttcgaaacggaattgatataattttttcctttttcaatcccggtttttacatgttttgcagctgctttttcaccggcttccaagacgttatccactttggcggcgcctgttttcgcgagcttgcttgatacttttacagctgagccggaacctttgagcccgacgatgctcccgatggcgtaagtgatgtaatgggatcttgaatacgcatccccgttaaccattttatcattccacgaatccgccaggtttgtccatatgatttttgcgtaggagggcgtgttcaatacagccgatatggttttagcgactttttgttcatcggagagatggtaaaaatcccatgcgccgacagccagatctttgacgccggttatggtgtcttttcccacatcataaaggccgacgcctattcctttgacgatatcccaagccgtttctccgacttcttcaagctgttttgcttgttcaagctgcattacatattccacctgagcgggttcaaggttttcatagccgatcttctttgcgatttccaaatactcatccggatcggtgacaccatcagccagctttttcttcagatccttgatttcacgctctttcgcttcttcctttttaatcgtcaaataagcatccgaatgtcttgcgatatcgccttttttcttatggatgtcgctttcacggtacgctttggcgttgtagtgaagcggcgtggcgctttttcctttgcctgtggcgttttggagctgctgaaagtcggcttggataaactgttcgttcgcttcggtttctgcgtattctttcgttagatcgtgatcaagcttgccgagtttatgtatggtttcgcttctttttttgtcagctgaagaaagcttttgatctgtgctttcggttgaaaacaattcgagcgagatgatgtcttcgatctcaccgaggatggagcgcatgtcttttttctgcgcttccataatcgcctttgatttactgagggcatgggtgagctcgtgctccagaaaagattcttctacatgagattcggaaagacctgcgtcttcgactttgccgggaaggcttgtgagaaatgcgattttcatatcgatcagatcaagccagctgtctgtgacgccggcgtgatcctggaaaaaggctttgatattgtcagcgccccggcctgagaaatcattgtcaccaagatcagccataccttgaaacgctttttttaggttgaccatctgaccgcgcagttttttatattcacccgcacgctgtttggcggcggcgaggagggtggttgcttcgaaaactttcatgaccatatcctttcatgcgaaatacttcaacaagatattaccatggaagaatgaaggaaaagccaaataagtattttgaaagtgcaaaatgattaatttgttctgggtaaatttacttattttatgatcgggaattggggtagagttagctttaggttgaatcggttgttagaacatcatgtgacgcacttcctttaaaaagcatacacacacatattagagggctgaaatttacccgaatgaattaggatacggcggcccaaactgctttccgcatggaatcaacctgggcaactggtcaatagctttaaaaacttcatcataacagggaagtgcggcgggcattgggaatataaaggaatataggcttacagctatgcaggatggatgaaaatccgtcagacggcgaaggaaaggcaatctccatgtgttgtgacagttcgaatgcgggggtacggaacttcccattcatccgagttatgtcagagggacgaaaagacttttttgaggaggaagcggaatgattaaatttacacggccttcacctatgaagaaaacatgtacgatgcacccggaaaaggaatctgtcagatcggtttcgtttactgattttaacggcaattctgtaacagtaacactttgtcaaatgtgtctggctgaattaaaaatgaaagccgcgactgaatacaggagcatgaccgaggagcgggccaaactgaatcgtttcaagattggtgatcatgtgtatttagagcatttgggagtcgtcagcgagataaaaaacatggaaggcgctcaagtggcaaacaggacagacacagacggagtccggaaggctacccctaaggaaatcgcagaatataaaaaacaggggaagcgatgacggtgaaaaaacgactcagtcaattatttatcagttgtgttacttatgggagcgggggccggatgtttacgggtgcgcgacttacacggccggagcctccacggtggagaggaggagaattcaaactaagaatgtgaattgatcaaacgcagtttcatgaatcttcgaaggctttccatccgaaatttgggtgcagtatgggaaatttttttgtggaaacttgacataatgctgtcaggtccctattgtatgattaaatgaatggccagtaaaatgataggaggcgttcaatatgaaactgctgcaaattagactattggttaatgactttaaaaaaagcgtcgagttttataaagattcattaggacttccaataagttggttagagaaggaaatggaatatgcacttttcgataatggagaaacgaaaatagagcttttatctcaagaaaatatggctgaaatagttggagaagaaagaaaatctttagacggagattcgcaatcgagatttttgcttcaatttaaggtagaagatgttgataaaacgtatgactatttgcacaagcaagggattacatgcgtcaatgaaccacatgatcgtcaggaatggcgtgcacgagttgctcatttcagagatccagataataatcttattgaaatatataaaatgatataattttgaccgcgagattaaggtaatgcgtttgttaacttaccttatgatttttatagtctgcaagagaaacatatatagatccaagacggaaagcctgcggacactgatcattgcacagctcactatgctctgattggtgtccgtttttatttgcacggagggataacaaatagataatgaacacgaagcggacatgcaaacattcagacgcggcaagggcggcgcatttaataaggggaggaatcagaatgcaggatttaatcattcacaggaaatatattgactttcatcctgtttgtaatgttaattagaagatgtatacaaaaacattataatgaggaggtctggatgtgaaaaataaagcgggaatacaagttggaatatgcattgggcttttatgtttaagctttaccggtttcagccctttattcggctctacgcacgctgaagcaaaatccatagaaaacacaaaaatgacaagctgtataacgaatcaaaaatttgttcagcttgagaaaaaatttgatgccaggcttggggtttatgcgattgatacggggtcaaacaagacaatcgcctatcggccgaatgaacggtttgcttacgcatcaacctataaagttctggctgcagctgctgttctgaagaaaagctcaaatgaaaaacttaatgccatcatccgctacagcaaagacgatttagttacatattctccaatcacagaaaaacacctggatacaggcatgagcctgaaagaaatctcagaagccgctgtccgttacagcgataatactgcggggaacctattgctgcagcagcttggcggccctaaaggtttcgaaaaatcactgaaacagattggggatcatgtaacgaaagcggatcgattcgagacggatctaaactctgcgattcccggggatcgtcgtgacacaagcacagcaaaggcactggcaaccgatcttaaagcgttcactttgggtaacactctcacgactgacaagcgcacgatcttaacggattggatgcggggcaacgctaccggcgatgaactgattcgggcaggcgctcctgcaggatgggaagtcggcgataaatccggagccggaagttacgggacgcgaaacgacattgccatcgtttggccgcctgacagagctccgattgttttggcaatcctgtcaaaccgatttacagaagatgccgattatcataatgctcttatcgctgaggctgcaaaagtcgctcttcatgatcttaaataaacattgccgttcattttttatggacggttttttatatgttgagaatgcggtatgcgggtttcgatgttataatgtaaagccataaaatgatgggaagagggggagtttcgatgcattacataacggcatgcttaaaaatcatcagtgataaagaccttaatgaaataatgaaggaattcaaaaacttgaggaagaaacgaacaaagaagaaggctgtattcagttccatgctcatccgcttgaaccatcagaacgcaaaattatgctttgggagatttgggaaaacgaagaagctgttaaagtccattttacgaaaaagcacacaaaagacgttcaaaaacaagaattaacggaagtagaatggttaatgaaaagcaatgtgaatgagtaaaaggctttgtatgttgttggctgactctgccggcaacaatcatcagtttcattcattaaaacccttgctgcgcaagggttttttactttgaaaagttctttatatcgcagtctttttatgggtaaggaacagacttggaatgaagatggccgcaaggatgatgacggatactaagaatccggcatggtagccttttaaactgttcggaatcgttggctgcaatccttgtatgacagttgcggtaacggttgcgatcacagctgacccaaagctggaaccgaggttttcaatcatatgaataccgacacctgcttccggaagctgtttgctgtcaagacctgtataagcgtcactcattaatgggagcataattcctccaaaactggtgccgcggataaataatacgacggaaatccaaatcatacttgtgttatcggtgataaaaataagcgggatagatccgatcagcgaaagaacaagactgaccgtaaccacgtatttcgcaccgatcttatcaatcatttttccgatcagcggacgagtcacgagcattccgactccttgagggattaaagcgagtgctgctccgactgccgtgaaatgacgaatgtcttgaaaaaacagcggaagtattaacatcggccccatgatggcaacattcgctaagaacaacccgatcgaagatgctaagaagctcttgtttgcaaacaaattcataggcagcacggtttggtttttcttgatcagattatatacaagataaatgactgctgaaacaagaccgatgcccgcccataaaatggtgtcgctattgttaaatgatgcatgatccgccgctttcgtaataccgtacatcaatgccgcgctcattaatgacaaattgataatcccgaaaatatcgagtttacgatctttgttgaatggttcaaagtctggaatggttttcatcataagcggtgcggcaaccaaaacgatgaacacgttgatgtaaaaaatccaatgccatgaagcgacttggacgatgaagcctccgatgacaggtcctaagatcgggccgaagatcataggggtgctgacgattgccatcacttttcccaggttttccggacctgccgttttaaccaagagtgttgacataagcggagtgataatgccggcgctgaatccttgaagcaaacggaagaagatgaagctggaaacgtcacggctcattcccgcaaaaacagaaatgacaccaaaggcgatgactgagccgatgaagattttcttaccgttatatttattcataagccagccggatacgggtactgcaatcgcaagtgctaacatatagcctgtaacggaccactgaatggtatccaatgtcgtgttgaagtctttggtcagtttgtcgatggcgatgtttaccatcgtagagtcaagcattggagcaattgctcccagtgcaatagcccaggcggctgtgagaacttcttttggcagccgaagttcctttcttttatgtgttgacatattattctcctctcaaaatcgccgtatttgtttccttgtcaacaaaataatagagtgattttgtttctttgtcaacaataagagggatataaaaaggcagcccgttttcatggagcagggctgcctatggttttattccgatttcatgtctgcaccaagtttctttatttctgaatccaaatgcctgctgtatgtttccacgaagctcagcatcgtgtcaaattgttcatcagttacttgttcaaacacgattttgtcccgttcttgaaactctttgtgcaattcctcgtgaattttataaatgacttttccttgctcggtaagcctgaaatagatttctttcttattaagcggcttctgatagctttcgataaggcctttattgataagcttcttcgttaatttacttatagcgcctcttgtcatataaagggactccgcaagttttgtcacattggcgtcttcaattttttcgatgaattcgatgcaatgcacttcagaaggtttatgccccttaaggctttcttccatcttcagcctattcagccacaccatcttgttaaaaaagtccctgaaatccgtgaggagctgttcttttttgtccatgacccgtcctcctgctcggtggtgcttacacaatattataaaatgtttgtttctttttcaacaatcgtaaagttattatttaggaactgagagatagtgcgcagaaataagaaggagggggaacagaagaagtatcctatttttaaccgaaatgtggtttttcgagtatgtttctttccgtattcgttattagctcttcataacaggctaactctgcagccttacaaaaaagcaggctgcgaaaagagcctgctttagaattgcatcaatcattttcctgttgcggcatcataaaaagcgtcaattgcggttgtgtatttcaagacgtttttagacacttttgcggttgcgcctaatggatacgcatctgacagaacgctggagtgagcttcgggttcccagtaaaatacgccggttcctttgccgttcggaacggctttcaccagttttatggtgtcttttatggtccagtaggaatctttcggattattttcatctccgcccagttcaaccaccatgacttccttgttgtagcgtgaggcgatgtcattcaaattagatgataaatggccggtgagctcccagtacggcttaccttcccaatagggatagaacgaaacgccgatgatgtcggttttccctccgtttttaaagaattgatcaaaccaccatctgaataggctgttgtccgtgccgtgtgctaaatggctgattaccttggtggccgggctgacggatttcacggcgtcatagcctttgttcagtaagccggtcaatttgctgaaatcgctcgtgctgccgtcgggcagtaaaattcctgaattcatttcatttcctacttgcacccaatcaggagagatgccgtgatttttaagttctttcatgacatcgtacgtatggttatacacggctgcctgcagctggctgtttgaatagccggtccattggttcggcttgatctggtggccgggatcagcgaacacatcactgtaatggaagtcaaccattactttcattcctaacgcttttgcccttttggccgccgcaagtacgcccgctttgtcactatagccgagcatcgtccatgttgtgccgtctttcagccaataatagctgcttggcggattcacaaacactctcagtctcacggcatttattccgtgatctttaagaatctgcaaggcatctttctgtttcccgccgtcatccagccagcgcacaccttcatcctccatttgtttcagccatcctatatcagcgccataggcaaacggggcatccgcttttgctttaggagacttctcaagaaatgtaaaagcggtgaaaatgagagaaagacagattgcgtttacaaatacacgtttcaatcggtttttgaacatcacaatacctcctgataaaaaagattgttgattgatttcactctgaatgtttcagctgtcattctccaataacgtcgtgaaacgctgaaacgcctgaattccttcgggtgtcattttaaaaacgcctgcatcggtcagcgcgcgtaaaaatacattcgcggtttctctttgtaaaacagcggctgcattttccggtgtcacgtctttatccgctttgatgttttcagcccacggaagatgaatgtccttgatgtcatgatgttcattcagtaaatactttttcacttctgccagctcatctttcagacggggaggtaaaacggcgagccccatcacttcaatcagaccgatattttcttttttgatgtgatgaacgtcttgatgcgggtgaaaaatgccatccggataatcttcggaggtgcggttgtttctgagagcgagatcgatttcaaaatccgttcccctgcgtctggcaatcggggtgacggtattatggggttcatttgtcttcgcgatgatgctgacggtttcgtctgaatattcccgccacttttcaaaaacatacgcagcggcatctgtcagcaaatccggatcttttgcgcgaaggcggatcactgataccggccacttcacggcttcggcctgaacgtctggaaaatgacgcatatgaaaagggtagagggaacccgcttttgccatgggaaactcatgggcgccgccttgataatgatcgtgtgaaagaatggaacctcctacgatcggcaagtctgcgtttgatcccgcgaaataatgagggaaaatttccgtaatggccagaagccttctgaagctttcgcggctgatgttcatcggcttgtgcacgcttgaaagaaagatggcatgctcgctgtaatacgcataaggagagtattgaaaaccccactgttctcccgctaagtcaagcctgatgatgcggtggtttgaacgggcggggtgatgcggtgttccggcatacccctcgttttccatacagagcagacatttcggataccggttttccggactgttttttaccgcggcgatgtctttagggtctttttccggttttgatagattaatggtgatgtccaattccccaaaaggtgttattgagcggtacacgatattttttcgaatggcccgcgtcttaatatagtcgttgttttgactcaatctataaaaataatctgttgcttttttcgggcaatctgataacaattcgctgaatgcgtcattgatcagagaaggggccggtgtgattacgtccatgattctgcttcccagcatgtctctttcagccggcgtatcgtttatgattgaccgttttaccgcgtctttcaccatttcgtccaaatagtgaagcctgttttgtttcttgatacgtttcggttctgcataatccgtcagtccgagcagatcgagaagtctgtttcttgtataaatcacatctgtttcatttatgtcgcctaagacagtgctttctttcagaaaccctgccactgattcaaaaacgtcaatgaccgccgcctccatttcatttgtccttgtatccgttaggatgatgccgatgccaattccatgctgacgcaatgatttccgatatgtccgtttgtttcggattccagccgagaatgttccgcgctttatcgctggaagcgatgagggcgcttggatcaccgggtcttcttgcggacgctcttacttttatgtctctttcggtcacttgccgggccgcttccgccatttctgatacggaaaacccgctgcttgatcctaaattgaaaatgccgctgtctccgccgttttgcaaatattccagagcgagaatatgggcatcgattaaatcagaaacatgaacataatcgcggatgcacgtgccgtcttttgtatcatagtcagtgccgaatatcaaaacctcctcgcgctgaccgagcgcggtttgtaaaaggatagggataaggtgggtttccggatgatgatcttctccgatggaaccgtccgttttcgcgccggcaacgttaaaataccgaagcgagacatattttatgccgcaagcggtatcgcaccacttcagcattttttctgccatgagttttgattcgccgtatgcgctttccggcttttccggcatgtcttctgtgatgggcgctttttcaggttcgccgtaaacagcggcggatgaagaaaacacaatgtgtttcacttcgaattcctgcatgacctccagcgtaatttgcgtaccgtacacattattattgaaatatgaaagagggtctttcattgattcgccgacaagggattgagcggcaaaatggagaacgcctgttacgttctccttcgcaaatacagagcgaagaaacggtttgtcacggatatctccatggtaaaaaacggctttttcatgaacggctttccggtggcctgtctggagattatccacagctatcgtttcaaatcctttgtttactaattgatcaaccgcatgagaaccgatatagccggctccgccgagaacgagaatcgccatgatttatttttccctccattcagccgcgccatcgcttatatccgcgatgtagaaagaagcttcaagacctgtcctgctgcggtagtgagatgaaacggcccggataaagccggcggtttcttcactttccacaatggctatggcgcagccgccgaaccccgcgcccgtcatccgcgctccgagtgctccttctttccaggctgcttcagccagcgcgtctaattcgtcaccggtcacttcgtagtcatcacgtaacgaacggtgcgacgcattcatcagctccccgaacgttttcaaatcattcgatttgagagcttccgccgctgagagggtccgctcgttttcattgaccgcgtgccgggctcttttacgcaaagtttcacgggagagaagaggttcgagttcgttgaattcttctcccgtcaattccgcaagtgatgcgatattttgatattgccgcagttccgtgagagccgcgtcgcattcgctgcggcgttcattatactttgaagccgccagctcccggcgcttgttcgtattcataatgacgattttatatccgttaaaagcagccggaatcatttcgtgctcaagcttatcgcagtttaacagaatggccatgttctttttgcctttttgcactgcgaattgatccataatccctgaattcacgccgataaattcattttcgactctttttccgataagcgccagttcagtatcggaaacatccaggctgaataactttcttaaaatggaaccggttaacatttcaatggaagcagaggagcttaaaccggctccgtttggaatcgtaccgtgaaaaagaatatccattccgctgtctatttggccgccggcttcaagaaggtaatggaccatccccttcggataattggcccagccgtcttcttttttgtatgcagtggcggaaagatcaaggcagacaatgccgctgtcaggaaagttttctgagtataaccggatctggtgatcttcgcgttttgcgcatacggcatatgttccgatcgtgatcgcgcatggaagaacgtgaccgcctatataatccgtatgttccccgatcaggttgatccggccgggtgcgaaaaacagttctccgttacttctcttgaaaatgtcttcgaatcttgatttcaaaagtttggcatccatggtaaacctccgattctattttgaggtatgctccagtatgaactgaatggctttttgtgaatttctggtgaggctgatatattccgctcctttcgttgcgacgagtttcacatgcaggcggtccgcatcttctttaatgtcatcataataagagccgacttgcggagccaaaatgatcatatcgaagtctttcatgatgtcgtaatgggatccgtaggcgcctgctgaggcggtgatcggcacgttgtattcttcggctccttcggtcagtgcgttcgcaagcatagcgctcgttcccgctccggcgcacagcactaacacattggtgccgtgttccaaggcggatgaggattcctgaagatttgtgctgatgacggtggccgcgtcttctgaggcgccggccattacgggctgtatctcccgggatttttgcggcgcggtttcaggttcggtatgttgggcttcttccgccgctaatactttgtcataagctttacagaatggcaggtatatcaggaaatcgacaataattaatacagccgtcagaacaaaagccgagagccccatgccggttccgagaatcaagccggcgggcgccggggtggcccacggaagaacatacataaaactgttcattccgatgacatccacgaaaaatttaaacagacagacattcaccatcggcgttacaacaaacggaatgaaaaaataaggatttaaaatgatcggcgcagcaaagagaagaggttcgtttactgcgaaagacaccggaaccgcggatgcttttccgactgctttcaattgcttggatttcgcgaaaagcagaaagataaacggaacaacaagggttgcgccggttcctcccattgtgccgacgaagttcccgagtccgacggtcagcacgttggacgcctgctcgccggcattatgaagctgaaggttcgcctccacatttgcgtaaataatagctgcgatggccggctctacaatagaaggcccgtgaacgccgacaaaccagaacagcgccatcattccccaaatgacacaaatcccgagataaccgtctgcggcggtaaaaaatggcgataagagagaggagagagcctccgcaaacgatacattcagcgtattcctgatcaataaatcaacgatcaccatggccaaaacggaaaaagcgaacggaaaaacatctttaaatgtttgtgaaatggtacccggtacttctttaggcattttaatcgtaatatttttcagcacgcagaatctgtaaacgttcaccgttatgaaagcggatacaaaagcggctaaaagaccttttgtgccgagatattccgcggagaacccgccgtcgatttgagtgacgcttaaaatgagaaacccgacgactgaagcaagcatcgctgaaacggggttgatccctttgtttttcggcatttttcggttcattgattcactcaggcatttcgcacttgttgccgcaacgatcagaccgagggcgcccattgaatagttataaactttccaaagccattcagaaacacttttaggccaagtgaaacccaacacttccggcacagcggcggtgaggatgaaaatgctggcgaataaaataacaggcatggcagttaagaagccgtcgcggatcgcgcctaaataaatgtttcttgagattttttcgaaaaacggttttcccttttcgatttgcttgatgataccgttcatttttccactccttatcggcggcttcggtagagttctataaaatcctgaataagatcacggagcaaaagggttgtcatcaagtggtcctggccgtgaacgaaaataaaccctaattccatgtccttgccgtcagcttcttcagctaacattttcgtttgcgcattgtgggcgagggttaaattttcatcggcgcttttcaatgctgcttccgtgttttcgaagtttccggcacggacttctttcaggactttcaataaagtgctcctggcgtcgccggcataggcgacgatttcaaaaccgagcatctgcaattcttcctttgtcatgaaaaaaacctcctaaagacggcacacatgatggaaagagattcttttcatcatgtatgatcgttaaatgattgtttttgtttcacttacaagtttgtaccagtaggccgattctttcggataccgtttttgggtgtcgaagtcgacgtaaaaaagaccgtaacgtttgttgtagccgttggtccatgaaaataaatccattaaggaccataagaagtacccctttacattgactccgtcggtaatcgctttactgacggcttctaaatatacttttaaatagtcgattcttgccttatccataatgatgccgtcttcaaactcatctttatagcccatgccgttttcggtaatgtaaattttgttatattgcggatagtcccgtttgatgcgcatcagcatgtcatacatgccttcagggtaaatgagccagtcccaatcggtccgcttcaggccttctttgtaaattcgttcgccgattccttttactttatagaccgaagtgcccttatcgcccgttccgttatggtgaataacggtttctccgtcgtacgctttgacgaaatggcattgataatgattgatgccgagataatcattgcgcgttgaggcttttttcatcacgtcaaagtcactgtctgaaaactcgtatgaagcgccgtttgcctcacagatttcatccagagcacgcatggtttcctcagaataatagccaaggtaggtggcatcgaggaggaatctcactgataacgcgtcatccagaaaacaggcgtggcggtcttcttctgtgccgctggcgggatattttgtttccaatgagtggacgaccccgatttctcccggataaccgccgtctttaaaaaggttgacggtcatcgcatgcgctaccatcatgtgatggaggcattgaatgacttttgtgatatcacttttaacagatggcgggaaaaccccgagtaaatactggttggtggctgtgggataaatttcgttaaacgtgctccaatatctgatttcgctgaattctttaaagcaaaactccgcatagctgacgaacgcttctattgcagcgcggttgaggaaatctccctgatcaaataatcctttcggtgtatcgaaatgatgcagcgtgacaaaaggggtgacgttgcgtttatggcactctgagaaaatacgatgatagtaatcaacaccttcctgattgattttgcccgtgccgtcagggaaaattctcgtccaggctatagaaaggcggatgccgtttattccgaatttttcacatagtttaatatcttccggaaactggcggtaaaaatcacttgccggatcagggctgaatcttccctgtttttcaagaaattcatcccaggccacagggcctttgccgccttcttttgtggcgccttccgcttgatatgccgcagtcgccccgccgaaaataaagtcatgaggtaatttgagcattactgaatcctccttcgccaatgtgtgaattggagtttgttaatgtttgtaattgttgtcttttgtttaatagtaaacgcatatatttttgttgtcaatagcttcataaagaaataacatctgtgtttatagaggttatataagtttttcgttgttttacatgttgattatgttgtttgttaatgtttatttttgttgaccggattgccgcagtatgttagattgtgtgtaaagttgaggggatgattgaacatgttaaaaaaagagcgacttttaaaaatcatcgatatcgtaaactcgcgggggtttattacggtgagtgatattatcgatgaactggaagtttctgatatgacagtgagaagagatctggacgagctggataaggccggaaaaatcgtacgtattcacggaggcgcacagagcatatcttattccattgatcacgaattatcgcataatgaaaaactcggtgttcaaatggaggagaaggggaagatcgcggaactcgcagcttcctatgtaaatgacggcgataccgtttttttagggcccggcacgacgattgaacttttagcgaaacacctgctgcataagcgaatcaggattatcacaaacaactatcccgtatttgatattttgaaacatggcgacactgcggataccatcctgattggcggcgacttccgaaaaaataccggtgccttcgtcggccccatcgtgaacggcaatctgcagaaattcaattttacgaaggctttcatcagcgccaacggcatacataatgatgagatttcttcttacagcattgaagaaggggaagctcaccaaatcgcgctgaataattcgcggacgaaatttttgctggcggataataaaaaatttaaccgggaagatttttacgtgttctataacttgcacgatatggactatctgattacggatgataaagtcatgaaagatgttcaaattcattacgagcaatatgtagatgtcaaaatcgcaaaaaaataaaaaaggcgggcggttcgatgaaaggggttatttttgatttcaacggcacgatgtttcaagattcgcatctgcacgaaaaagcatggtttttcatggtgaaaaaatacgcgccgaaaaccatttctgatgaagacattttcgttaacattcacgggagaacaaacagtgaaatcctgacgtattttatttccggcgatttaacaaatgaagaaatcaggaagctgtcttttgaaaaagaagcttactacagagaattatgccttgaaaacaaagacgaattaaagctgacgaagggactgaccggcgtattgaatcatctgaaaaaatctgaaacgccgatgaccatcgctacggctacggtaaaggaaaatgtcgagttttactttgacgtctttcatttggatcagtggtttgattttgacaaagtcacgtttgatgacgggagcttccccggaaaaccggcgccggatatttttctcatcgcatcggaaaagttaggcctcagacctgaagaatgcttggtcattgaagatgccttttcggggctcacagcggcgaaaaaagcaggtgcgggcaagattatggccattgacccgcacggaaaaaaccgcgcgctatttgaagaaaaacagctggcgggtgacgggatactgacagatttcacctcgttttttgaggtgattgccggacattctgtttgagagatgcagttggattgagagtgatctttactttaatgtgaaatgcctttggttgaagctattatgagcttcattaaggattcattgagaggtgttattctatattacacttatatactaaatttttagtaaactgttggccaataaccgagaagtgaaaaccaaatcacttttaaatccagaggcctttttcaatatttctttgatcgaaagtaagtgatcttggatcgcttagttaaatgaatctcttgtcatacgatcgccatctataaatggaattatcacaaagatgagaggaatgaataaattgacagagaaatatgacaagtggacaagattacttgatatgattgaacctaattatgcttttgaatcagcagttgtgggtaactctatttatgtattgggaggtgcacgtaatcaaaaatataacaaaaattatagttttgacaccataagtcaaaaatggacgcaaggattagatatacccacacccagggtaggttcatgcacagcagtgataggtaattatatttatgtattgggcggttataagggagcaaatgtttacagctctgtagatgtttatgatactaaaacaaatacatggggacgtgtacctgatattccgaccccgacttgccatgcatcagccgctgttattaacgatacaatttatttgattgggggattcgacaccgatgctgctcattcgcaacattatgcttttgatactttatccaaaacttggagtgttaaaaaagcgcccccaattaatatatatgcaacagaaactgaagtttttaacggaaagatttatttagttggcgggcaaactaaagaagtagttcaaggacatatcagaagcgatctaaacgaatatatttacgaatatgatcctgttatggatagatggaatcgcaaaaaatttttaggacctttgcaaaatacttcgacagctgtccttaataataagatttacattattggcggtagaaaaaatccaagtgtgattgagcctttaacaaaagtatatgatccaattaaagatgaaattagcgtagaaaaaccctatccttttgaaagatatgatgccagaatagccgcagttggagacaatctttatctttttggcggtctaacgccgtctggatatgcattagaatatctgcatgctcttactccggtaaaaaccgaagaggataaagatggagaaccaaagaatcctgaggaaccaccaaataaacagcccgccagtaatcgggcaattcttcttgttacaatgaccacaggtcttgagaaagaatttgatctttcaatggaagagattaaagattttatcagatggtatgatcaaaaaagttctggaataggcttatctagatatgttatcgagaagcactataataatatagggccttttcaaaatagaagggaccatattgtttttggaaacattcttacttttaatgtgagtgagtacactttagataaataattacctgttttccttctgcagccctcttttttaaaaagagggctttttttatgaggtgcttattctttttcagttgcgcttttgtttttgtataatgattttctcattgaaggcggcattttttgcatcagaaaggtgttcgccttaattgaaatattggctgaatttatagattcgcagagataagggagtcgtaaaagatatgccgtttgcggatttcagcctgtcttttgagaaggatcattcttcaatgacgcttatttcccccgtaccgaaaaaaagtgaaacacgttctcctcgcttttcataggttttgataagtccttcctgccctttaagtttccagcctttttcggctatttccaattggtataaaccgctcggaccttcttcttcttttgcgaaacggtatgtatagtttgaaacgtattttcctttttcatattcctttgttttagtgtgcatagcgaataatggcaccgggaaatcagggtgagaaacagctgctttatatcctcccaaaataaataagctaaataacaataatataaaaaaccacagaatatatttcataaaacctccttatgtcaattagtcggtgcattttaaaaaaagatacaccgcatgattgggttataaaagcgggtaagaagataaggaaaggagagagacggatggaacttgattttgtgattcgtctggcggttgcgggtctgcttggggctcttattggattggagagagaattcagggcaaaggaagccggtttgaggacgcattttttagtggccgtcggcagcgccttgatgatgatcgtttccaaatacggcttttttgatttgttatccaacagccatacgtcctttgatccgagccgggtggcggcgcaggtcgtcagcggcgtcggatttttaggagccggcacgattattttgcagcggcatgtcgtgcgggggcttacgacggccgcggggatttgggctacgtcggggatcgggctgacgatcggggcaggtatgtatgtcatcggcatcagcggcacgattttggcgttaatcgggcttgaactgttaaattttctgtttaaaccggcggcgcattctttgtctgtcagtttcaggattgaagagaaagccgtcatgcatgatattttaacttctcttgaggaaaaaggaattctgattacgtcctatgaattgaataaggcggtgcttgaagtgaagggaagggtgaaaagcaaaagcgggaaagcagcggtaatggagaaagttcaagccctcccgtatatcctgtcggtcaaagttgaatagcagacaggggaagcctcctgtctgcagtcatttcttttcaaacattaataccaaggatagaacgggatatacggccgcggatagtatgggtatggtctggggtaataataaggcggccgcggatagtatggatatggtctggggtaataataaggcggccgcggataatgatatggcacccgttcgtggctctcggctgtgtattcatgatcgaaaggatcgtacaagaggaaaacctccttttcaaatgttggttccgtttaccttattcctgtatgcccggtacggtgtatgtacaatgggcaaaaaaaagacgccggttatcatccggcatctttttttacactttcacatcaattgaatggccggcagtcgggtgctgggacggcagcattttcactgtttcttccgccgcagcctgtgcatgctgcatgaccgtttttgttaaagcgatatttacattctgcgccagagatgactgatgcattgcgattgataacgcagggatatccatagcttccacctccttatcccttcatatcggcggcgtgctccgattatgaagagggctggcggtttctttttacggcccattctaaaagtgcggcagcgcataccccgagggtataggcgaaaatgtcactccagacaaattgccagccgaggatcagcccgccgagcgtgctgcttctgatcgcgtcaatccatggcgcgtgatacagctggctgcattcaatcagacagcaaaacgagaggctcaaaattgcggctgtttccgtccggatgtgccgtaagaaaagcccgaatcctgtaaaaatcatggccgcccacaaggcatctcctaaataagcgtttatgatgccgggcaatagggcggtgatgtatgcggttctggacagcaaaccgagggcgatgataaaaacggtacatattccgtatgtcaatggatgtctattcacttcacactgttcccctttttttgtactcccatgtattgtaaggaacgacggagaagctgtctatgaaaaaacggcccgggaggccgcttttttgcgttatctggcttttaggttgacatgatctgctttttgatcactgccgatgacgaagcggagctcatactgccccgtatggtagacgtaatctgtttcgcccgtttctggcactgtcaggattttgtcagcgctgccgatttgtttgcttaagacgtcaggtgtgacgctgccgaggtttaagcgccgctcgacccccgttccaaaatagcgtatttccgagatttttccgtttttatgataggaaaatccatacccggggtttcccatgttccagctgtataaatcaaatggattgcggctgtctgctttttgttccggctcgccgattttattgtaaacgtcctgtcttgtgctttggttgattttcaggcctttcacattttgcggcatttcccctttaaatgccgattggtaaaggctgttcaccagttcttgtgcacgctggttttccgtttttgaagcggctgcggcatggacgggctgtgtatccgaaaatgcttctgctccgaaagcgcatcccgtgagcatcactgccgataatcccgtgacgagtgtttttttcttcaacatgtgaacgcctcctttttaccgctcatacccgtatgtttcctgagataaacgagatgttttagtgaaaggccggttgggaatcatagaggatgtatagaggggtacagaaaggggaaagaaaatggctgatacaaagaaagttacaatcaatggggttgaaatggaagcgccggacggccaaaccgttttgcagcttttgaacaatagttcaattgacgtgccgcacgtgtgttatcacccgagtctcgggccgattgaaacgtgcgatacctgtatcgtcaatgttaacggggaactggtgcgttcgtgttccgcgcaaataaaggacggagatgtcattgatacgctttcgtccgatgtaaaaaaagcgcaggttatcggcatggacaacattttgcacaaccatgaattgtactgtacggtctgtgattacaacaatgggagctgcgaaatacataataccgtaaaggaaatgaaaatcaatcatcaaagcattccgttcgatcaaaaaccgtatcctaaagatgaatcaaatccgttttaccgatatgatcccgatcagtgcattttgtgcggacgctgcgtcgaagcctgtcaggacgtacaggtaaccgaaaccttaagcattgattgggagcggaaacgcccgcgggtcatttgggatcaggatgtgccgatcaatgaatcatcatgtgtttcctgcggacattgttcgacggtatgtccgtgcaatgccatgatggaaaaaggcatggaaggcgaagctgggtatttaacaggcattaaccaagagacgcttcggccgatgattgatatcacaaaaggcgtcgaaaccggatacggatcaattttagccatatcggatatggaatcggccatgcgggatgaaagaatcaaaaaaacgaaaaccgtatgcacatactgcggtgtcggctgcagttttgatatatggacgaaaggaagagacattttaaaggtcgagcctcaggctgaggcgcccgcaaatggaatttcgacgtgtgtgaaagggaaattcggctgggatttcgtcaatagtgaaaagcgccttaccaaaccgcttatccgggaaggagactcgtttcgggaggcggaatgggatgaagcgctgcagctgatcgctgataaatttaccgatataaaagaacatttcggcccggacgcgcttgcgtttatcacatcttccaaatgcacgaatgaagaatcatacgtgatgcagaagcttgcaagagccgttatcggaacaaataatgtcgacaactgctcacgctactgccagtctcccgccacggccggattgttcagaacggtcggatacggcggtgattcagggtcgattacagatatagaaaaagctgagctcgtgctgattatcggttcaaatacatctgagtctcaccccgtcctgtccacacgcattaaacgttctcataagctgcacggacagaagctcgtcgttgctgacttgcgaaaacatgaaatggccgagcgctccgacgtgtttttccagccgcgtgccggatcagatattgtctggctgaatgccgtatcgaaatatctgcttgatcacgatttggcggatactgcatttctgaaggagagagtgaacggattagatgaattcgtgaaaagccttgaaccttatacgatggaatatgcggaaaaacataccggtgtggacaaggataccttaattaaagtggcccggatgattcatgaagccaaaagcgtatgcgcactgtgggcgatgggggtcacccagcatatcggaggaagtgatacgagcacggccatttccaacatgcttcttgtgaccggaaattacggcaagcccggcgcaggctcatatccgcttcggggccataataacgtgcagggagccagtgatttcggcagtatgcctgacagcttccccggctatgaaaaagtaacggatgaaaaagcccgcaaaaagtatgaacagggctggggaacagacctgccgaaagaaatcggaatgacaaatcatgaaatgatcgagggcatccactcgggaaaactgaagtgtatgtatgtaaaaggggaagaaatggggcttgtcgactccaatatcaaccatgttcatgccgcctttgaaaagcttgatttcttcgttgtgcaggatatttttctctcgcggacggccgagttcgccgatgtggtgctcccggcaagcccgagtcttgaaaaagaagggacgtttacgaatacggaacggagggtgcagcgcctttacgaagtgtttgaaccgctgggcgattcaaagcctgattggcagatcattacggacatcgccaaccggctgggcgctgattggcgctatgaacatccggcagacattatggaagaagcggcaatgctttcgccgctctacgtaggcgtcacttacgaacgtctcgaaggctacaattcactgcaatggccggtagcagcggacggaaccgattcaccgcttttatttacggacaagtttccgttttcagacggcaaagcgattctatatcccgttcagtggaccgagccgaaagaatttgatgaagaatatgatatccatgtgaataacgggcggctgctcgagcattttcacgaagggaatctgacttaccgatcaaaaggaatatccgaaaaaacaccgagtgtgttccttgaggtctcgcccgaactcgccgaagaaagagggctggaagacggaacgcttgtccgtctgacatcaccgtacggaaatgtgaaagtcaaatgcgtcatcacagacagggtaaaaggcaaacaagtctatctcccgatgaacgattcaaaagacgccgccattaaccttttgacaagcagctatgcggataaggataccgatacaccggcatataaagaaacatcagcgaagatggagattttgaaaaaagaaggcgttaatccgcttccgaaaatcaatttccgttacggaaacccgcagccgcagatcggtgtccgggttgatcggaaatgggcgcgtcaagattatgtatttccgggagacgccgtaaaaagggggaaacagcagaatggctaaagcaatcagcggcatccgaaaacagaccgtcacagaagaagacaaacgaaaaaaggacttagaagagatcgagacggctcttttacgaaataaagacgcgattttggaatctctgcacattcttcagcacatgaacgagcgcggcgttttggcgcttctgcgcgggctcttcggccaaggagacaaagtgatggatatcctggtgaagaaggcgaatacgccggaaacggccaatatgctgaaaaatctcctgctgttaagcggcgttctcggcatgctcgatgtaaaacagcttgagccgtttatcgttaaaatcaatgcgggcgtcacaaaggccgtcgaagaaaaagacagcggcaggaagacgggttattttgatatcgtccgcgctttaaaagacccggaaatcaacaaggccgtcactctgctgttttctttcctgaaaggcatgggcgctgatacggacgatatggaaagaaatacgcagcctcctgaagaccaaaagcagcaccagaaaccgcagacgaatgagtgaacatttctcccgagcctggctgaaggctcgggttttttgtgcgcttctgctgttttcttgggagaaatttcacctccggattcatgacttttgttgtgttatgttaatagttaaggttatgaatagaaaaaaattgaaaatatgtgctaggataaaattcaaggtacgtcaactattcaaatatgaaacaatcaggagtgatgtaacatgagtaagctgaggagcacgagacaagccatccaaagaaccctgatgaaaggaaaaaacggcctggacgtatacaacccttttccttggtatgaaaaaatgagacgtgaaagccctatatactttgatgaagaaacgaaggtttggagtgtgtttttatacgatgatgtcaaaaaagtcatcagtgataaagagacgttctcaagccgcatgactgatgtgaaaagctcgattgcaaagtccatgctgaatatggacccgccgaaacatacccaaatcagatctgccgtcaatcgcgctttcactccccgtgtcttgaaggaatgggagccgagaattaaagacattaccgatcatctcctgaaacaggcaaagaacaaagggcggattgatatcgttaaagatctctcttaccctttgccggtcatggtgatttcagaattattaggcgttccgtccgagcgtatggatcagtttaaaaaatggtcggacattctcgtcagcatgccgaaagatgcgagtcctgaagcggcggagaaaaatcagcaggaacgtgaccaatgtgaggcggagctggcggcgttttttgcgggaataatagaaagcaaacgaaaacagcccggccaagatattatttctattttgataaaagaggaagaagagggagagaagctcacgccagaagatctgatcccgttttgcaacctgcttttagtggcgggaaatgaaacaacgactaatctcatttcaaatgcggtttacagcatattagagacgcccggcctttatgaagagctgagacaggacccttctctcatcgcgcaaacagtggaagaaacgctgcgttttcgcgctcccgctccgtttgtcagaaggacggtccggcacgacactgaactgcgcgggcgccgcttgaaaagcggagagatcgttctctgctacgttgcatctgccaaccgtgatgaaaacaaatttgagaaggcgggcgtatttgatatccatcgccaatcgaatccgcacctttccttcggattcggcgtacacttctgcttaggcgctccgcttgccagacttgaagcggaagccgcactgaaaggaattgtaaaagccttttcacaccttgagcccgttcggattgagccgatccgaaacagtgtcatgtacgggctggagtctttagaagccgagataaacgaaaatgagggagaagaaaaaagatgagaaaaacacacatcgccattattaatgtggccgctcacggtcatgtcaatcccacgcttcctgtagccgaggaacttgtcaatcgcggatataaagtgacattcgctacgactgaggaatttgaagcttccgttgccaaaacgggtgccattcccgttttataccgcacaagcataaaggcggacccgaagacgataaaagaacgggtaaacaaaagtgacgcgtttgtgatgtttctggaagaagcggttgaagtgcttccgcagctggaagagctgtacaaagacgaccttcctgacatcgtcctgtttgattttttagcgcttgccggaaaattgtttgcggataatggcggcatcccggccgtaaagttctgcccgagttatgcaatgaatgagtattttcaattaggaagagacgaagaaacgatggaagcggccaaacaggcgatagaagaatatcaggagaaaattgaaaatgaacaagtgaaacggatgacaatggaagaatttttcatgcctgaaaaattgaatatcgtctttatgccaagggcctttcagccgaaacaggaaacctttgatgaacgattctgttttgcgggtccgtctcttggggaacgcacaaatacgggaagtctggaaattgatgcagccgatgaccgtccgcttatgctcatctcactgggaacggcgtttaacgcctggcctgaattttaccggatgtgtattgacgcgtttcgggactcgggctggcgggttattatgtcagtcggcacaacaattgatccggaaagtttttcggatgtgcccgatcactttatcatccgccagcacgttccgcagcttgatgtgctggagaaagcaaagctgttcgtatctcacggcgggatgaacagtacaatggaggcgatgaatgcgggtgttccgctcgttgtcgttccgcaaatgcacgaacaagaggtcaccgcaaagcgtgtggatgaattggggcttggcgtgcatctgccgctgaaagaagtcactgtggcccgtctgcaaaaagacgttcagaacgtatacggcgataaaaacattctcagccgcgtgaaaagcatgcagcagaaaataaaagaaaccggcggtccaaaacaggctgtttgcgccattgaagaatttttgaaaacggcgtccgtcgaaaattgattaggaaaacaggcagcaccggacggctgcctgttttgttatatgtttttcttcatgccgcatctccggcattccctcaaaaattttccgcccttcactgagcttttaaacagcgtgtagtcgcaattgtcacatcggccgctgtgaacatcaggatattcattgaactcataaatgaccgaagtatcgtatccttttgtctcgaactctttttttgtttccatgattgaaagtccctccgcgaatcaaatcgttctgtccggttaatgatacagcaactgcacgggggattcaacgggagcatagcttgattttcccgtctgattgcgtaacaataatagaaataaatgacggcctgccatagggcgcccggcatctgaagggaagaagaaaacagcgatgggaaaaggattgaacgggaaacggattgccatcggcggttcgcggaaaacagaagagatcacaaaattaatagaaaagcagggcggaacggcggtcatccgttccctccaaggaaccgtatacctggcggaggatcaaatggaacccgacgtaagaacatttgccgagcaaaaagccgactgggtgatattcaccacaggcatcggtacggaaacgttattgtcggtatcggaaaaaatcggtctgaaagaagaatttttagcggccattcatgaagcgaaaatcggctgcagaggctataaaacatatgcggccttaaaaaagctcggcatcacgccgcatgcctcagatgaagacggtacaacaagagggctgatccgctccttggaacgatttgactttaaagataaaaaagttatgatacagcttcatggcgaaaaagcgccggttttaacggagttccttgagaaaaacggagcggaggtattccctgttctgccgtatcagcatattccgcctgaaagggagacggtcgataaactgatgggagagctgttaaacggagaggtcgatgccgtatgttttacgacagccattcaagtgcgctctctctttgattatgcaaaagaaaaaggatccgcaaaagaattgcagcaggcattcgaaaaacatgtgcttgccgccgcagtcggcaaagtgacggctgaagcgatccgggatgaaggggtaaagagggtccttgctccggacattgagcggatgggagcgatgataattgaattatcccgttactatgaatctctgaccttgtcataaaccaccattcagcagggaaaaaagcttacgcttccctgctgaatttttttaattgccagtgttccgtgaaaagggaaggatatgtcaaggcgctgagtatgatgcatgtaagaagagcggaggccatcgttgtaaaaacgatcagcagctgaaagcgcaccgcctgtatcggatcagcccccgctaaaatctgccccgtcatcatgccgggaagctgaacgagacccaatgttttctggctttctagcgtcgggatcatactgagtttcatactggacgtcaatatctgccggacggcctgcttaggcgttcctccgagagagagaatcagctggatttcttctttccgcaggtctgcttccgaactgagccggcttaaaaacagacttgagagcaccatggagtttccgatgaccatgccgcttatcggaatgacatatcttgaagtgaacggaatgatgtgaagggtcagtaaaagtccctgcgtcacggtttccgcgattgccagtgtcagaaaaacgcgccaaaatgagccgatccgcatttttttccgtttggcgacattgtgcgaagcggccgtgagcatgagaagcaccattaatatgataaatatcgggtgatcaccgcgaaaaatcagcgacagcacatagccgatgatgagaagctgaatgacggccctgacggttgcgacgatcatatccttttcgacaccggctttaaaagatttagacaggaataaagcgataatgacaaatatacttgttagtaacagtgaaagatcattcatatcagcacccgctcccttgtaaaagcgcccgggctttttcgtgtttcggttccttaaagaacgttttcgtttccgcggtctctaaaagccgtccctcagccataaaccataccgtatcggataatcgttctgcttgttcaaggttatgggtgatccacaggattgtcagctgtttttgccgatggagtttcgtaatcagtttctcaatggtgagaacggatgaggagtcgagcgccgaggtgatttcatccagcagtaggatggacggcagtccggcgagagttcgcgctaatgagagtttctgccgctgacctccggataattctttcgcattccgatccagaagcccgcgcggaaggtctgtaaaatctgcgagctcttcaggggtatagtgctgcgccccgtggagtttttctgcgagcagaaggttgtcccgcaccgtgccctccgtgacgggagctgattgaaatgcaaggcccgcggtttttctgagctccctgatatcccagcgccttatttcttttccgaatacaagcacttccccttcatcaggtgtattcatcagattgcaaagtgacagcaatgtgctttttcccgcgccggaaggccctatcaacgccgtgatagaacctttttggatatgtccggttacacggcttaggacatcaaaggacgtattgttttgttcaaagcgtttgccggctgacagaaaagatattgccggaatttcttctttcatataggatgacacctttcgtaaaaaatcaggaaccggtgagattggctgacgtttgctccgccgttttctggtctgtctgccgggaagcgaatgtatgcatgaccattcccgcaataataatgaacagtccggcaaatgaaagaagtgacggaaacgccgcggataaaaagacgatttcgccgatcagtgcaaaaagaacctctccggactgcgtcgcttcaacagcagcgagcttctgcggctcattcctcaccatatcggtggcgcggaaaaataatactgttgcgataacgcccgagctgagtgcgacgataaaggattggaatgtctgtcccattgagggaagcccgtctctataccagccgaaagcggcgatcaaaagccaaaacggaaggcttgcgagcgtcatgccgagcacccgctgaaacgtatcgagttttccgccgtattgttccagcattttgcggttgccgagcggataggcaaacgccgcgacgacgaccggcgccacgctgaatagtatcgtgcggccggacagagaacccgcatgctgaagctgaatcagcccggctccgatcaggatgatgacggaagtaaccagcgaaatcagcgggatcttttgtctgacggaaaccgggcccgccggtgaattttttgtttcgcagaaaaacggcgacagaagcacacccgcgacaattgtaatctgccacgtgccggcgatcagccagccaggcccatatgccgccgcaaacgtaatcggggcataaaaaagcacgaacccggtaaaactccacttcagccaaaaaaacggttttttccggatttcatgccagagcggcgcccattttcctttcgcataaacgatcaaaaataaaaacggaatcataaaaagaaaacgcagggaagagctccacatccagcttccgccggaaagctccatcgccctgtttaaaataaatgtgactgcaaaaaacagagatgccaatattccgatcacgatggctttcattaaatccctcattttgacacatatttttttatactatactattcaccggcaggcttcgcaatggaatatgagaaaatagcgttttaataaatgatgaatgggaaacagacatatacggaggtgaacacaatgcagaaagaggatattcaagtgctttatttcgaaggtgacggccgcattccgaataacccgaatcttccgcttgttatttataaagcggtatttaatgaagaaacggtacagaaagcagagtccgtcctccgccggcacgattggtctaacagctggacgggcggagtatttccgtatcatcattttcacagcaccacgcacgaagttcttgtcgcggtaaaaggaaccgcggttttgaggttcggcggggaacaaggggcggacgccgttcttcaaacgggagacgcagcggtcattccggcaggcaccggacataaaaaactgtcgggcagttctgattttaccgtgatcggggcttatccgggcggccggcagtacgatacaaaaacggagaaaaatgatagaacttcagaagaaatcagccgtgtcccgctcccggaatgtgacccctttacgggaaaatcgggcccgcttttagaattgtgggaaaaatgacaggggaaaagcggacggtctgtaaaaaaatagcctaaaagaaacgttattacacccccgccatataaataatttcataaacgaaacaattcacgttcaaattttgttcaaaaagtgttattatataagagtaaatcaaattggggttttttatgtttgctattttcagagaggaaaaagaaattttgacttattcaattgtttttgttgatataaaaataatactggatatggcaaagtgaaaaactgggtagtaaacatttatttttgtaaatgattgtgcatgaattcacaatcttgctttttcatgcttttctgcatgaagggggaaaggctaccctttccaaaaaaaatcagcatactgcttatagtaaaggagaatcggatatgccagaaacaatcgatcaaacaaatgcatctgtcagccaaggccaacgcgatcttattgatcagctgctaaaacctgaagttcaagaatcactgactgttttagtggatcagcttccaaaactgactgagttagtaaatattttaacgaagtcttatgattttgcacagtctgtagcgacagacgaagtattgaagagcgatacagtgggtgcgcttacagaaattcttgagccggtgaaagaaacagcgaaagaagttgcggctactgccatcgaagcaaaagaccgcgcggatgcaagcaatgaaacgatcggacttttcggcctgctgcgcatgctgaaagatcctcaagctcaaaagctgttccgttttgctaacagctatcttgaaatcatgaacgaaaaacaaaaataatctcagattcaaattgatataaaggacggaggatatacgatgtcaaaacatattgtcattttaggcgctggttacggcggagttctttctgctttaaccgttcgcaaacattacagtaaagatgaagcacgcgtaaccgttgtgaacaaatacccgactcaccaaatcattacggaactgcaccgccttgcagccggcaacgtgtctgaacaggctgttgctatgccgctggaaaaacttctgaaaggaaaagacgttgacattaaaatcgcagaagtcaattctttctcagttgataagaaagaagttgccctttctgacggttctaagctgacttatgacgcgcttgttgtcggacttggttctgttacggcttatttcggcattcctggactcgaagaaaacagcatggtgctgaaatctgctgctgatgccaacaaagtatacaaacacgtggaagaccgtgtgcgtgaatactctaaaacgaaaaacgaagctgatgcaacgatccttatcggcggcggcggcttaacaggcgtcgagcttgtcggtgagcttgctgacatcatgccgaaccttacgaaaaaatacggcgtagacccgaaagaaatcaaactgaaattagtagaagcaggtccgaaaattcttcctgttcttcctgatgaccttatcgaacgcgcgacaaaaagtcttgaaaaacgcggcgttgagttcttaacaggtcttcctgttacaaatgttgaaggaaacgttattgatctgaaagacggttcaaaagtcgttgccaacacatttgtatggacaggcggcgtacaaggcaacccgttagtcggcgaatccggccttgaagtgaaccgcggccgtgcgacggttaacgatttcttacaatctacttctcacgaagatgtattcgttgtcggagacagcgctgtatactttgcgccggacggccgtccgtacccgccgacagcgcaaatcgcttggcagatgggtgaacttgtcggttacaacctgttcgcttacttagaaggaaaaacgcttgaaacattcaagcctgtaaactctggtacgcttgcaagcctcggacgtaaagacgcggttgccatcatcggagcgaactctactccgctgaaaggccttccggcatctttaatgaaagaagcaagtaacgtacgttatttaacacatatcaaaggattattcagcctcgcttactaatccttaagatcatacagaagacattgccggacttttctcggcaatgtcttttttttgcataaaaatgttaatagatacaattttctgaaaaataaaataaaaatgattgatatgtgagaaagaggaagctaaaataaaaaagaaccattttgttaacgttaacattttttaagagggaggatgagagtgtgaaagcttttatgggtgatgactttttactggatagtaaaacggccgtaatgctgtaccgggaatacgctgaaaacatgccgatcattgattatcactgtcacttaagcccaaaggaaatctatgaaaataaaaccttcacaaccattacggaggcatggctttacggtgatcactacaagtggcggatcatgagggccaacggcattgaagagcgctgcattaccggaaacgcttcagatgaagagaagtttttcgcctgggcaaaaacggtgccgatggcgataggcaatccgctgtacagctggacgcatttagagctgcagcgctggttcggcatttatgacgtattgaatgaaaaaacggccgcggcaatttggaaaaatacgaatgagctcctgcagggagacgggtttggcgcaagggatctcattctgaaatcaaatgtcaaagtcatttgcacaaccgatgatcctgccgatgcgctgacataccatgaaatgttgaaagaaagtgattttccggttcaagtgctgcccggatttcggcctgacaaaggtctggacatcagcagcccgggttttgccgattgggtccggtcgctggagagcgcttccggaatggctgtcaccacctaccaatcgtatttggatgcgttggaatcccgcgtccgcttttttcacaatgccgggggaagagtgtcggatcacgcattagatcaaatggtttatgccgagacgaccgaagaggaagcggcccggatttttgccgccggattaagcggagagcatgtgtcttttgaagatgaaaagaaattcaaaacacggacgctgcaatatctttgcggtctttacgccgaactggactgggcgatgcagttccatattaacgcgttaagaaataccaatacaaataagttcagcagcctcggtcctgatacgggatatgactcgattaatgatgaatgtatcgcaaaaccgcttgcccggctgttagattccgccgaaaaaaagtggcaattgcctaaaacgattttgtattctctgaatccgaatgacaactatattatcgccagcatgatcaacagctttcaggatgggaaaacaccggggaaaattcaattcggcacagcctggtggttcaatgacacgaaagatggaatgcttcaacaaatgaaagcgttatcaaacacaggcctgttcagccggtttatcgggatgctgacggattcaagaagtttcctgtcctatccccgccatgaatacttcaggcggcttgtctgcacgctgatcggcggctgggcggaacaaggcgaagcgccctgcgatatggagcttttagggaggattgtcgagggaatttgttaccggaatgctgaggaatatttccgcttttaaaaaatggaatgaaagaggtggcctatgagtaatgtgcctgtcgtgacagcacctgccgcaaaagtgaaggagcataagctgagtctgaaagaaaaagtatcctatggtttcggagattttgggaacggatttatgtttgatctcgggcagatctatttgctgaagtttttcacagatgtcgcaggcattccggcagcgttcgccggcagtatttttttggtcagcaagctgtttgcggctttgactgatccgattgtcggctcggccattgactacagaaaaaagatcggaccccgggggaaattcaggccgtacttattattcggaagtattattcttgcggtcatgaccgtattgatttttgtgtcaccggacgtgagtgtcacctggaagcttgtgtacgcctatgcttcttacatgctgtggggggtcgcttattctttcgtcaatattccgtacggctccctcggtgcagccattacacaggatgcggaggacagaacggcgctttccgcattccgccagatcggctctctcggcgcgctgctcattacaagtgtcatcgtcatcccgattctcgttcattttgataacgttcacatcggctacccggcagtcatgggaatgatggccgtaatcggaatcgcgggatttatgatctgctaccgaaactgcaaagaaagaattatcgtccgtgaagcgccgaaagaaaagctgtccgtcatgtcggttttcaaatgctttatcggcaacaaaccgcttctgactgtcgttttcatgacgattttctcaatatcggcatacaacattaaatccgctatgcttgtttacttcgcccaatacaatctcaacaatgcggagctgatgtcctacatgagttttatcatcatcggctcttcatttttaggtgtgttgtttatgccgaaactcgtcaaacgcttcggaaaaaagcaaacggtgatgatcggttttgccgtcagcgccgcggctgatgcgctgaatttctgtctcccgtcaaatgtatatatctttacggcgttagcgagcattgcttttatcgggatcagtataccaaacggcattacgtgggcgcttgtgtcggacattattgattacggagagtggaagacgggtgaacggaaggaggcgacgacatattcgcttttcaacttctccagaaaactcgcccaatctttatcaggttttctttcaggcatcgggctgagcgttatcggctatatcccgaatgcgtctcagacaaaaggcacgttaatcgggattaaagggcttctgctgctgtacccggctttcgctttagcgtgcgccatgctgattatcggtttaatgtataaactgacggaccggcagcatgacgagctcgttcaggacttacatcatgcaaaacctcaactttagtgattttatggactgtccgttaatggtacaatagaaataaatgacagcatacagaaagaaaggaaaaacgatggtaaccataaaagatatcgcaaaactcgccaacgtatcccacacaaccgtatcccgggcacttaacggcagcccctacattaaagagcatacaaaacagaaaatattagagctcgcttcacagctgaattacacaccgaatgtaaatgcaaaaagccttgccatgcaaaagtcccatacgatcggactgttttttacaagcatcacaaacggaacctcacacagctttttttccgataccatcaaaggtgtaaaccgcacaatcagtgaggaatacaatttgttcgtccgcgcgattgacgatctgaaaagctttgaaaccattacgcccatgagatatgacggaatcattttaatgagccaaagcgacagtgataattcatttatttatcatatccgcgagaaaaacatcccgctcgtcgtgctgaaccgggacattgatgaccggagcatcacgaatatcctgtcaaacgataaagaaggctccagacaggcggtcgactgcctgatcgcaaacggacacagagatatcgcgatcattgagggaaaggaaggattcaggtcagcttctcagcggaaagaaggctatttgacatctttaattgatcattctatcccgattaagcatgaatacagtgtaaaaggccgctatgatatggaaagcggcagtcaggcgatggaaaaacttttggcgcttcaatcaccgcctacggctgttttttgttcaaacgatgatatggcgatcggggcgatgaataccattttcgccaaaggcctgaacgttccggaagatatttccgttatcgggtttgatgacatcggcatttcccaatacatgacgccgaggctttcgacagtaaaacgcccggttgaaaaaatcagcatactcggcgcagagaaaattttggcgcttatcaccgacccggatacggcggcggaaaaaatatacgaaaacaccgaggtgatgataagagattcaattaaaaaactcacataacggcccgtctgattatccgggtttttgtacgggagaatgttaacgtgtgcataaatataaggaggcggacagcttgcggcagctgaataaaaagatgtgcggaaaatacattcaatatcctgaaaaagtccttcagttcggcgaaggcaactttttgcgggccttcgctgactggcagatcgatcaattgaatcaattgacggattttaacggaagcgttgtcgccgtacagccgagaggctctgagaaaataaaacgtttaaacgaacaggacggtttgtttacgctttttttgcgggggataaaggacggaaaaccggctgaagaacacacgatcgtcaaatccatcagccgcggcattgatcttttttctgactatgattcctttaaacggctggcagcacaagaggatcttcgttttatcatctccaatacgacagaagcgggaatcacgtttgagaaaggcgaccggcttgaggataggcctcaaaaaacattccccgggaaattagcggcgttcctttatttccgctataaggcatttgcgggtgacgccgagaaagggtgcattgtgcttccatgtgaactggtcgaagaaaacggacggaaactgaaggctgccgtgcttcaatatgccgggctgtgggagctggagcctgattttactcaatggattcatgatgcgaacatcttctgcaataccctcgtggatcggattgttccgggatttcctgttgataccgcggaagaacttaccgattttctcggatacgaagaccgtctgcttgtggtcggtgagcattattatttgtgggtgatagaagggccggaacagcttcagaatgagcttccttttgctgatgccgggctgaacgcactgatcacgtctgaccttacgccttacaggacaaaaaaggtgagaatcttaaacggcgctcatacggcattggcgccagtggctttattatacggactgctaaccgtccgggaagcggctgagcacgaggtgacgggcagattcatcgaagagctgatcaatgaagaaatccttcccgtgctgcaaatggagggtgtcacccagtatgcggcagatgtgttacaccggtttaaaaacccttatatccaacattatctgcaaagcatcacccttaacgccgccgcgaaattcaaaacaagaaacctgccgacgctgaaggcttatatcgaacaggagggccggcttcctgagaggctggtattttcattcagcgccatgatctattcatactggaacgggctgaacaaaccggcagatggcgaggaggttctgaaccgttttcaaatggcgcggtcccgttgcaaagatgatatgtttcaagcggcattttctatattaggagaagagcgattgtggggaaagaatctgaaccatcttccggggctgactgaacgaacggctttttttctctctgtcattcataagcgggggatgaagcatgcgttacatgaatgctgcggcaataaggggggaagtgaaatgaaagaggtcataaaaatccataaaaacgataacgtgcttctcgctatgcgccattttaacaaaggggagcggctgtatacagacggactggcgattgaagtgaaggaccctgtaaagcgggggcataaaatcgcgctgcaaaccattgaagaaaacggcagcatcattaaatacggtttttcaatcgggcgtgcgacaaggcggatttcggccggcgagcatattcatacccataatctgcaaacgaatttatccgatgtgcaagaatacacgtattcaccgcgcttcgaggacaatccttttacaaatgagaaccggacatttaaaggctacaaaagagaaaacggtacatccggcgtccggaatgaactgtggatcgtgcctacagtcggctgcgtaaacggcgtcgctgagaaaatcctgcagcgcttcgtaaaagaggcgaaagacattgccccctttgacaatgtgctggttttaaagcaccaatacggctgctcccagcttggcgatgatcatgagaatacgaaacaaatgctgattaacgccattcgccatccaaatgcgggcggtgtgctggttttagggctaggctgtgaaaataatgagctggcggcaattaaggaaacgctttctgaagtgaacggagatcgggtgaaatttctcgaatcacaggctgtcacagatgaaattgaagcggggacagcgcttcttaaagagatacaccttgcggcaaagggagataaacgtgaggagattcccctgtcagaattgagcatcggattgaaatgcggcgggtcggacggtttttccggcatcaccgcaaaccctttattaggaagattttcagattacttgattgcacagggagggagtacggtcttaacggaggtgcctgagatgttcggcgctgagacgattctcatgcagcgtgcggtgagtgaagaagtgtttcataaaacagtccgattgatcaatgatttcaagcaatattttatgaagcacgagcagccgatttatgaaaacccgtcaccagggaataaggaaggcggcatttcaacgctcgaagacaagtcgctcggctgcacccaaaaagccggtcttgcaccggtttctgatgtgctgacatacggtgaaacactgaaaacaaagggattgacactgctcagtgcgcccggcaatgatttaatcgcttcttcagcgctcgctgcggcgggctgtcacatcgtgttgtttacaaccggaagaggcacgccgttcggcacatttgtcccgactgtgaaagtatcaacaaataccgatttatttcaatcaaaacctcattggattgattacaatgcgggcagattggcggaagaccaaacaacagaagatcacattgtgagagattttattcaatacattattaaagttgcaagcggagaatacgtcaataacgaaaaaaacgattttcgggagcttgcaatctttaagtccggtgtgacgttataagggaaaaggcgatctgacaacagaccgccttttcgcattcacttatcgttttgccccttgatgaattgtgaatatctatgagctataataatggaatggtgccttacataaaggagatttttataatatatataattattatggaagattggtttttagtcacatatttcagagggggtcctaatgaataacattttatacattgaagatgaccaagaaattggccaatttgtaaaggatgatttagaagatcggggctatatgattatatggctcacttcttcctataattacgaaacatatatagaaaaggctgatctgatcgtgcttgatataatgatgcccggtttagatggatttacaatcggtcaaaggatgaaaaaaacacatccgcagatcccgctcttgcttttaacagcgagaacgggtctggaagataaactgaaaggcttaggatttgcggatgattacgtgacaaaaccctttcatcccgatgaactggccgctcgaatcgaagtattattaagaagatttgacaagactgccattcatgaattgaagctaaaacacttaagtgtccacttgaaagaaaaaagaattttaaatcatcaaagtcatgaggaaatatttttaactgataagcagttaaggatttttttgcttttgcttagacatcccaatcaaatattaacaaaggaacaaatttatgaaaatatttgggagcagccttatatcgaaggggataagacgttgatggtacatatcaggcatttacggcaaaaaatcgagatcaatccaaatgagccggaaattcttgaaacgatcagagggattggatacaggattaaacaatgaaattatcaacaaaataccttattaatatcgttgcctcaattttgttttttccgatagcctttttaggtgtgaattttctttactatgtcacattaacatacttgattgatcaccaggggcaagtacactatgaaccaaacaagttggaaagtgattggaagtctgatgtggaaggtttttcagggaaatccaatcgggaaattacgtctgctttcccgcacatgaagcaatataaacactctgatattgtatggataaatgataagggaaaggtgatgttttcgaactcagaacggttggccaaaaagggtgaggttattcacgttagcgaattgattaaattgatggaacaaaaccaaaagaaatatttattgctgagtgcttatgtaaatgggagtgaagacagcggatatgcatttttagaaactccgcgctcaattataggatctcaatgggaggttatgagggccaagtattcctatatatggtttatcgccttgatttttgtctgttcactttttgtgattaattcatggatgttttttgcgaaaatacaaaaaaggttaatttctttggggaatcatatgaaaaaacaagataatgacggcataccggaatttgtaacagttaaacagaaggatgaactgggtcaagtggaatattcattcaaccagatggttgaggaactaaggaacagcagacaaaaagagcgtgaagaaggcgaaatccgaaaaaacttgattgctgatttatctcatgatttaaggacccctcttacggttataagagggcatacatttacgttgaagaatgaaataagcagtgaaaatggaaagcattctttaggcatcataaacgataaaataacgtttatgggcgaactgattgacaatttgtcatcattttctcttcttgccgcaggtaaattgccgcttcataaaaagagttgtgacatattaaagataatacgttcttcgttaacagcttggtatccaatttttgagaaagagcacttcacaatagatattgatctgaaggaaaacatcgtatgggaaatagacgagacttggctgaagagaattcttgataacatttttcaaaatgttttgcgccatgctcattcaggaaaatacgtttccgtacagacaaagctaattgaaaacaaacccgtaatcataattgaggataggggcccgggaatgaattataaatctgaaagaaaaggcgccgggatcggcttatcgatcattaatatgatgcttaaacaaatggggcttgaacataaaataaagagcaatcaaaacggaacggtttttattatttatccaaacagcaatgaatacgtgaagccgtagaggcttcacgtattttttatattgagaaatttaaacgtaaattaaccttgactatatcttctttttaacctcgtaagtttatattataaacagaacaagacggagaggaatgatgaaaagtgggaaaggctgatccagctttaatatccaagggtatcaatgtttctataaaaaagaaagaaattttacatgatataaatttaacattggaaaaaggtaaaatatatggtttattaggtcccaacggtgcaggaaaaacgacattgcttaaagttctgttagggatatttcctccaacttcaggtgaagtgatttttgagggggatgacttatatggaaatccaaataatgatgtgattcagtctataggaagcattatagaatttcctggcttttatgaaaatttgaatctttttgagaatattaaattacatcttaactatttaaaaaaatcagcttctgatgaagaaataaatgagattttaggaaaggttggactttttgaacataaagataagctgttttcgcaaacttcattaggaatgaaacagaggctgggaattgccagagcagttgcgcatgctcctgcattgcttttgctggatgagccgacgaacggtttagatccatatggtattaaagaagtacgtgaaatgttgatccaagaggtaatgaaaaatggaaccacagtcgttatttcaagtcaccttttaagtgagattaatctcatggccgatgaattgcttattatgaataaggggcagattattttcgagtcagcctttatgaaaaatacgcaacatctttatttgtacaaaattccagctgaagcgggtattaattgggcggatattgagaaatttgcggatcatgttatttcaaagaataaacagcaattcgagtttatttcaataattcatccgtcggaaatgaaagagaaattaaattcttggggatttaacaaggcgtctattgacggatttaagctatctttggaagatctttatttaaaactgctggcaaaggagaaaggtcatgagtctgttagtgcgtaacgagtttctgaaacttaaaagactgaaatcaatttatgttattttctttctaagctttttgccatttctcataaacggaatcggtcttttgactatgaacgaaaatacagattggaacaaattttatatgtttgtttttaatcagtattcgatcctatttccgactattatttttattttttcaggtttttatttttatttagaatttaaaaacaggacaatgttgaattggatgtcatatccgtatcataaattcaaattgatattatcaaagctagctgcagcttttctatttttgtttttaatctcagctgttaatcatattattcacttatccaccttgtttttcttttttcgggaagatatctcagcaagcgacttattaagattaatagcgacatcttttacttctactactttgagcctgctaaccattccgattgcagctttaattgctttcttaagtaaaaatctagtggttgtcatgataaccggtgtagcttcctttttaataatgacgatactgttagcaagtgatgtctcaatagtctttcctttttcttttatttatcgtttcagtattcaaatttctgaaagtgatatgggatataccaattcaattcttttagtttggggattactgattatggggctgtatgttttggtatccttatcaggattatacgtatattcgaaaaaaaacagaatgtaaatggaggatgagtatacatggagcaagttatttttgtgatttcaatgctcgctttaggagttacactggttacctttttcggaatgattttgaatgacggattaagaggcgtactaaacttttcaagaaaacctgtaaaatttatgactggatcatttctggtatacattgttgcctttgctgtttatattttaataagtgtaaagtaactttttcattttaaggggattcaaagggattcccttattttccttagtaaggggcttggatacaaatgaaagataattgggtgaagcttaatattgagcagtttgcaagggcttttgttttctccttattattgttttttatgcttttgcttataacagacagccaattacagtttaaacagtatagtctattttttgttctaagtatattcggcagtagttgtttatgctttacctatgatgacagaaataagacatatcttcgcagcctgttccgtttttcagaattatgtcaaaagggatccgatgcagatcaattgataaaagaactaaccaatgaaatacagagtgtgctctcaggaaagcagattgctcttataaactatgacaaaaaaacattaaaattgagagaaaaaaacattcaagttcctaacataaacatttcaaattttaagataggagaaatacgtgaaaccgccagcggatcaattctgtttatcggggagaagtgtgatacatttgtttttattcatttatcacatgaaggacaccctataaagattcgtgaaaacgaggcagattggctgcgaatgctggcattctgcacagcatctgcacttcagaacaaattattgattcaaaaaaaaattgatgaaattatcatagacgatcaacataaatgtaagtcggctgtactttctaaggttttattttcaatttcagaaatagagagaaccaagcttgcacaggatattcatgactctatcattcaagagctgatatttgtatgcagagaattagagtatcatgttgagaaatacaaggatatttattacataagagaaattttgctggacaatatccagtatataagagaaaaatgttttgatttaagaccaccttttttaatggagatgggacttcttcgaagcattcaagtcctgattgataaacataaaagcaactatcagcttgatattgaattctttgtagatgtaaaagatgattctatttttacagaagatatcacaataaacatttaccggattgttcaagaactgcttactaatgctgtaaaacattcaaaagccagttatattgttttgacgatgattcaaaaaaaaacaagtcttatgtttgtttacgaagataatggaatcggcattgattggaataaagtaaattcaaaaacaaacagttttgggctgacagggataaaagagcggataaattgtatgaatggtattcataatatatcttcaagcgtaaatgaaggattgctgttaaggtttgaaataagtacgaaaaatgaatagggagcgctgacatgataaagattctattaattgatgatcatattggtgttgctcaagggacaaaagccattcttgaaaaaagcaataaaatgggagtaacaatattgtcttgctgtaaagaagtacttaatcaccttaagcattatgagtatgacttaattttacttgatttatatatgccggagttaaatggaatggaattgtcaaaaatgattcttagagagagccccgatcaaaaaattataatttatactggttttgatatctctgtgcatttcaatcttttggttgaagttggtgtttccgggttcataagtaagtcatcaacagaagaacatatgataaaagtaattgaaagtgtcattgagggagataccattattcctactcatctctttaaacaattaagaagaacagaagcaaatacgttcaacattgataagcttgaagatagaataagagatattactttaaatgaaagagaacaagatatcttagcgggcgtagcggagggaatgacaaaccgggaattatcagcaaagctgttgatcagtcaaagagcggttgaatacattcttactggtgtgtacaacaagctcggagtaaaatccagaacagaggcactgatcaaagcaaatcgatattcattaatttctatgaaaactatatatgagtaaatgaatcgggattaacggaacagttaatcccgattttctttataacctatacttcggaaacgcgcaaaaaaaaagcgcttttccgaatatgacttttcggtgcctataggtaaaagatcgtttatcataggtttatagaaatatatggatcaaaatccaatatatttcaaaaatcaaggggaggaatattaatgaatgagaaaatgtatcgttttgccggtgatttaagagaagaacttgaggaaatttctttaagtgaattcagcggaggaggaggcgcagaacagcgagggatttctcaaggaaatgatggtaagctttgtacgttaacttgggaatgcggtctttgtcctactcacacttgctggtgttaaaacaacccgaaataagaaaatagatttccaatgctctgggagatccagctgtctccctctttttttaaaggagatgaatattaaatgaattcgctaactaatattctattaagtaaagaaaaaaaagctgctgtctctcaatttgatgaaaatgagaaactgtttgatcgaaacttagaactaatctataagaatgatattcaaatggcccaggaaagcatttataatgtgttatccattcaatcaattgataaagtgaaaagcttatatcaaaccccactacataaatccgcttttacagttcatgttttcgaaaacctaaaaaaagggatcgctcaccaagctattaaaaaagaagacgtaaatgaagaaatcatgtttcacgtttttgcgttaaaagtgtcctcttacttcaatgatctacttaaaaaatcaaagtttccttcttatgactatctgctggaacaaccggctctttttcatcatagtatttcaaatcaattagaaaaaatcattttaaaagtatcctatagaacacttgtattggatatgaatatgaatcgggaaaaaggttttttggcaggggagactcctaaagaaaaatatggtgattataataaaactcttttgtgcagtcaggagtatcttgaaaactttttccaacgatatccagtcttattaagagcgattggaaatgaactgagaaaattcaaaaaattcatactggaatttatctcccgttttgaaaaggacaagcctgaactgctctctttatttggtttttcagaacaagtcaaaataagggacattgaagtagggatgggtgattctcattctgatgggagaaaggttactaaaataacattaaatgaaggtaaacttatttataagccgagaagtttagaaattgatctattatataaaaagataattgaatttttgaatgagaaaattagagatcatgatataaaattgagcactccgaatgtccttagcagagacggatatggatggactgaatttatatcttttaaagcatgcaattgtttaaaagatgttcaaaacttttatcagcgtacaggagctcaaatcggtttgttatatgcattgaaagctgttgattttcattcggaaaatctcattgccaacggcagctatccagttctcattgatttggaatccttatttcatcctgcataccagaaaaaaaaggatgggatggacgcttatgaaaaagctgaaacgcagcttcatgaatctgtcagagcattagggctgcttccttttttctttgcgggcaaagccgacatcagcggaataggtcggaaagggaaagcaaagtcgatcattaaagttcctcagcttatcaatttaaagacagcagaaatgtctgtcaaacgagactatgtcgaaattgatacagctaataatcaccctatgcttgagaataaatttgtatatgcaaaagattatgtcgaagaactgaagcaaggtttttcaaaagcatatatgactatattaaaacatgcttcggagctgattcgcataatagaaaagagcgaaaacaagatatatgttcggtttatatcaaaaccgacaataaagtattctgctttattagaattaagttttcatcctagatttttacacaactctattgatagagaaattttcttatcaaaaatatgggagagaccaaagcaagaagatgaatatcaatctattgttaaatatgagttcaacgatttaattaataatgatataccttatttcaaagtgaaattgaatgagaaagacttactaagctcaaaaaataagaaaattgaaaattactttccggaaacaccagctcaaagtgtaaaagaaagaatttcaaatttatcaaaagacgatttaaagtttcagctctatgttatcgaactgtcaatgcttgcttcggaggatgatcggcaaattgttttgaaagaatttataacaaaagaaccaggacaatatgtaaatgttttcagtagtaaccaagaaagtatcttaatagaaaaagcagaggaattggccgcttatatttataatcaatcttacaaagcacacacagataaaggaagttcgtattcttggcttaacgctactcctattggagttgatgaaattcaatggaacttatccgttatgggtgataccttttacgacgggctttccgggatggctttcacctacctggctttatggcgcgtcacgaaaaaagaaaagtatctggacattgccgaaaaaattatgaaagatgtcatctctcgttttattgatattgaggtgaaaccggacgaagacagcagtatgtctgtaggtgctttttccggagtgtcttcaatagtatatactttaatgaatttctatatgtatactaaacgcgaaaaatataaacagaatgcaaaacaaatcgctcagcttattccgtccttgcttccttatgataaagaattggatataatcgggggcacagcaggggctcttattgtaatgatacgttcgtttgaaatagagaatgatacattctttttatcattggctgaacaatgcggttcatttttaatgaaacaagcgatctttcttgatgaggattttgtcacttgggaaggtattgcaaataagccgttaacgggtttttcccatggaaacgctggaatgatatatgcccttcaattactcgagaaacattcaaaacatcaagatataagtatgtacatccgaaaaggacttgcttttgaaaattcaaaaaaagtaaacggtaactggcttgatctgagaaaaacggtaaatgaagctgcaacatctgcatggtgccatggatcccctggaattctattaagcagattagaattgaaagattcaaaacaccctgatattgccgaagtggccaaaaaagatctgaataaaaccgtttctaacattttttatgacggttttggccgagagcaaagtctttgtcacggagacatgggaaatgctttaatactgatcgaatatggaaaaaagactggtgaaagtcaatttgtaaatataggaaaaaacttgattttggagagtgtacaagacaaaaatataggtttctaccaatgcggagttggaagggatgttgaaacacctaatttaatgcttggtttagcggggatcgtatatggaatgctgtatgcagcagacgcagaattgccgaatattctcaatcttgaaataggacgtgtagatacattaggagacatttatgaaaattagaaaaagaaagcttccggttattcttcaaagaaatcaatttgattgcggtattacttgtttagccatggttttgagcagggctgagggaataaaaatcaatcctaacaaattgaaattaaataaagaaattatcggaagagacggcactgatttaatagaaatgaaaaggatttctgaaacattcgattatgatttcaaagcattccgcacagacaatataacgcagcttaaagagttaaataaaaaccatccgctaattgttcattggaatcataatcattttgtagttgtcgacgcatttggcacagataacgttaaaattatagacccttcgtctggcagactgacaatcacattagaagagttcaaaaccttctataatggcatttctattatgttaatcagaaagaacgaacttgagagaaaggataagactgcttcgtcgttaaaagatgtgtcttcatttagaaagatcggaaaatatcttttgaaagataaaaaattgttgggggttattataagtttcacttttatttttcaagcattaaacttaatgaccccttttttgactcaatatattattgattcatttattgacggaaatgagaaaattcttcccataccaatgcttttcatgattgtaattgtttcaatcgtattattctttagtctgtccttaatcagaatgaaatttattatcaaactgcaattaaaaattaataagagtatgactgataaaataattcataaaatatttagtcttccattaaagttttttgaggcgaatactgccggggatatttcaactagaatccataacattgctgtaattcgtgaagtcatttccaggttagcgtctactttgatattagatatcagtcttatatttgtatttttcatagtcatgtttgtttattctccgatattatcttttatagttttattgggagcagctatacaggtgatgagtactaaaattttgcttccgaaaattgaaatgttcacaaaacaggaagtaaatagtcaatccaattttcagagccagctaatcgaaatcttaagatcaatgacatttataaaaacaataggagaaaccaggaatattgagagccaattaaattataactttaatcatcagttagattatttctctaaaagaatgaattattcatctttactgggtgcggtctccaatgcaatcaatctatctttgccattacttattttaattgtgggtacttggtcagcagtatctataggccttacgctaggcgcagtaattgctttttctaacattgccggacggtttatgtctccgctgggatcaattatcggcagtttagagtctattaaattagttgaagaaatggtagacagggttgaggctgtactggatgaaaaagatgaggaagtaaatgataaaagcattgaactatttaacccggccgctcataatatcagcttgaaaaatattgatttcagctacaacggaaacgattatattttgaataatataaatttaatgatccggccgagagaaaaaatcacattaattggaaaaactggaagcggaaagtctactttgattaaaatcattgccggcctttatcaaaaaacagcaggagaaatttgctacggtgaattcaaaatcgaggacgttaatatggttaagctgagagaaacgttaggttatattgttcaagatgtcaatctgtttaatgacactattataaataatataaaatatttcaatgaaaaaataacaatggaagaagttgtacaagctgcaaaagaagcatgtattcatgaggatattataaaaatgcctatggggtatcataccatgattggagaaaatggtattaccttatcaggtggacagcggcagagaatctcaatagccagagtattagcgaaaaatccgcgaattctatttatagatgaaggaacaagcaatttggataaggatacagaattaaatatattaaataacatttacaaaaaggatatcactgtaatttctattactcatagaaccgaatggctcgaattctccgaatctgtctacgagattgaaaatggaaacttaaagacgattaagaccaaatatgaatcacagctccagcagacttattaacttgaaaggaggtgaaatatggaatatgaaagagaacttcagcgcgttgtatgaaacatcagagcaagaattaagagagcttattggagggcaaaactcagtatcaataacaacaattccaataacaaatcatgtttgtccaactatcacagtaggctgcgcatgtccgcaaaggcaagtataaaaaacaatcggggggatttttaatgaaaaaagaatttttagcattggaactaatgactgaggaagaattaaaagaattggcgggggctcggaggcaactccaatgactgtaacaccgacaaccatcacaataccaatctctttagcaggctgtccgacaactaaatgtgcgtctattgtcagtccatgtaacgactgaaatttataaaaaactcaaacaataggaggaattaacatgaaaaaagattttcaagcactgactccaatgactgaagaagaattaaaaaaccttgcagggggttcagatgcaaccccgatgaccgtaacgccgacaaccatcacaataccaatctctttagcaggctgtccgacgacaaagtgtgcgtccattgtcagtccatgtaacgattaaacatatccgaaaaagaatatgtatatgcgtacatattctttttcttttttgtcaaagacagtcaagaatatataaggaagtgataattgtgaacaaaacacagaattcggctaactatgtttatgaaaactctatgttgaatatttttaaagaagaggattatttcgaaggttttgcgcagtattatataagtatttttaaagctcagattgttaaagaaatagatagaataccatccgaaagtctgttggataagggatgtcttgttgaatcgatattaattaattataagaaaaaaatatactatttggcggggaaaacacttatccatgagtttcatcaaacttttgacgagtttgatgaaaaaaatgaatctaaaaattatgatatattctcagaaaggctgaaaaactccgcatttgttgaagaaatactcaataattatcctgtattgcaagatttaatctccagatccacctctgattttatacgcttcactatatctattattaaacattgggttaatgactataaaaaaatccaacaaaaattcaacttttcgttcggaaaaatgagaaaggttaatatgaatgcaggggatgttcataatggcggtaaaagtgttgttattattgaatttgagaataacaaactcgtttataaaccccgttcacttgaaattgatgttttttatgaaaaggtcattgattatgtcaatcagtattatcaaactaatttaaaaacacctttatccttggatcaaggtgagtacgggtggcaagagtatgtacagtctgaaccgtgcgataatattgaacaggtaagaaattattattaccaatttggaatgcatttaggatttatttatgcttttcaagggtcagattttcattttgaaaatatcatagcatgtcgtgataaaccagtgttggttgatcttgagactctgtttcaaagcagcctctttttttctgaggagaacaaggaaaatgttaatttaatggcatcagcacaggtaaataaaacaatattaaaatctgcactttttaactatatgagttttccggaagataatgggctgactaatataggaggcttgataaacacagaaaatcaaaaaggtgaaaaagaagaagtgcttcatataaaaacagataaaatttctataagaaagaaacaatatctcttcaaaaggggaaggaatcttcctgtttacaaaaataaagtagcagaatgttttgaatttgaaagagaatttattgaaggcttcaaaagaatattcttgattttgaaagaagatttatatatacggaaccttataagcgaattaaattatgcccctattagaattattgtcagacctacatatgtttacgcttcatttcttgaaaccctcctccatcctatgtatttaaaagattatggagaaaggataagggttttatcttttattaaggatgcttatacaaaatatgaagtatttgattccatcagtccatttgagatcaaggatatgatgatcggtgatataccctattttaatgctcctattagtgaaaaaagggtttattcaaattcaatacatgtggtggatacagggattatgaaacaaagcgctaaacaagaagttttaactcgtttagcgaatatgtcggaagaagacatgcatcagcaagtgagcttgataaatatggccttaagctccacggcggctaatttggatattatttataaaaatcaaattgatgattttgtacctggatatttaaaaaatgacatacaaatcaaagagctgattcaaatagaaacagattgtatattaaaacaagcaatcgaatcggagaaatatcttcaatgggtatcaatagtctcggctcccaatggcaccttatccgtaggaccgttgagttttgggctgtacgatgggttagctggagtggggctttatttttcagcttatgattttatttataatgatgaaaaagtcaaatcgattcttcgtaaaatagtgaattcaattaatcaaatatatgagcatagtatttataaaacaaatttctctgctttttacgggtcaagttcttatatctattttgtcaataaaatgagaggtaccggactttattcggaaaatgaagtgaatagtatgtgtaaagcatacttagagaaacttcgtcaggaaaccgctcaaataacacataccgattttataggcggactcgcaggtatattaaaggttgtgattcagcttggcaggtattatcggactgaattaatggaagatacggcaagggcagtttgtaaagaaatatgcaaaagaatgattcaaaatagaaatgaagcatattggaaatccgacgcggatgagaatgttgttttagcagggttttctcacggtattactgggatttgttatgcactatctgaatattatgcgcatattgaggcatctggagaagtacttagactgattgaatcagctctcaaatacgaagataaattttttgatactaaaataaaaaaatggagggataacagaaaaaatgagtcggattattcttccgcaatgtggtgtcacgggtcttgcggtattcttcttggaagaagcaggatatacgagaatgtagacgggcgcattcacgttgggtatattaatgagtctttagatgacacattgctgaatggaaattcccatcgtcagggctactcattatgccatggaacgatggggaatatagatgtacttcacgctattaaggaattatctctctttaaaaatcgcaagcaagagattgagaatacaattaatatatgggttaaccattttaaagagaccctgttgaaaaatggctggcaaaatggaataagaaatgatcattcgggacttggtatgatgttagggaaaaccggacaattatatgcacttttaaggttagttaataaagaaattcccaccccattggctttggattgagggggatttcccaaataaaaaagcgatcctgtaaaggacgctttttttagattaattttatcccgctgattaaaataatcgccgccatcacaaactgcagcgggcgcggtgagaatttcggcgaaaagaagctgccgagaagcacacccggcacagagccgatcaacagattcaatacaagcaggtaatcgacgcttccgaagcttgcgtttaacagaccggcaacagttacgagcaaaaaggcatgtgcgatatccgttcccaccacttctgctgttttcattctgaacaggtataacatggcgatcgcaaataatgagccggacccaatagatgtcaggccgacgatgaagccgaaaatgacgccgatcagtatcatgagtgtccgcttttcttcaagtgttttttgctgccagcggttcggccgcagttttttatcgaaaaaaaggcgggcgataatggaaatggcgacaagggtcagcacgtagccgagcgcctgtttgataatctgctcctgatgctggtgaaaagcgggaaacaagtgaagaataccgatggcggctgttgcgctgggaatgctcccgagcgccaagtagccgacaagtttaaattgaacggtgcgctgcttccaatgagaaacgacaccgaacagtttggtgatggaattatataaaaggtcagtgccgacggcgattgaggggttgatccccaaaacgatcagtaaaggagtcaaaagcgccgctccccccacacccgtcaatccgaccagcgttccgacaaagaaacccataaacacaatgcttacagtcatctgtgtgcctcctgaataatcctactatttttatcagattatatatgattaagaggcggtaatcaattaaattttcggaaaattttatacagaacaaaaaatccgcctgcctgctgttatttcgcagatcggcggatgatggccggattatgatttttgctgataaaacggaagttccgtgtggcccatttctctgacatacacgaaaagattgcctttatgatgaatttcatgctccatggcaagctgaaggagagccgcgccggttatttttctgccgaaagaggcagtcaggtcaatttcgcggttcagctgctcttcagtcagctgtgacaggatgtctgtcgttttttcagtacatgcttcagccagtttgacgaggtctgtttccgcttcttctttcggtttgttctggatagctgacccgtttccgtcgttaatgacgtttgcaaacataagaaaagaataaacgatgtgttttacaagttcctgagcggacattgatgtctccgccggcttgtagtcgtaatgctcgcggctgattttttccgccagctcaatcgtcacgtttcgatgtgacagaaagtggctgaccaattgattttgtgctgtcatgtgaaaacccccatttaatacagaataaaagctgcaaggatatgctatatcaacggcacggaagaaacaagcaataagcttgtgatggagataaatcgttgcggatatccgaaattcgacaattgcggtctttttgcgttcttctttttctagcaattatgataaaatatgacatatctcggtcattccaaaagggggatttattgaggatgaagcagactattccgtcctcttttgtcgggctcaaaattaatgaatggtatacccatatccggcagtttcacgtccttgaggcggagcgcgtcaaacgtgaagtagagagagagattgaggatatggaagaagatcaggatctgctgctgtattattcattaatggaattcagacaccgcgtcatgctggattacatcaagcccttaaaggaggacccttctcagcctgagttttcagaattattggaagacattgaaggcaaccagtataaactgacaggactgcttgattactactttaatttttttcgaggaatgtacgaatttaaacagaaaatgttcctaaacgccatgatgtattacaaacgggctgaaaaaaccttgcactcgtttctgatgacatcgagaaagctgagtttgcttttaaaatggccgagattttttacaacctgaaacaaacctacgtctccatgagttatgccgttcaagcccttgaaacgtaccaatcgtatgagacgtacaacgtccgcagaatccaatgtgaattcgttattgcagggaattatgatgacatgcagtatccagaaagagcattgccccacttagaacttgctttagatcttgcaaaacaagaaggcaatccccgtcttatcagttcagccttatataatctcggaaactgttacgaaaaaatgggagacctctctaaagcagccgaatattttgagacatccgtttccatttgcaggtcagaaaagttcgataatcttccgcattctatttactcattaacacaggttctttataaacagaacactacagccgaagcagagaagcaatatcgcctcgggctcagtatcgcccgcgaatacaatgatgaattgtttgtcaatctgttccaatttttgcatgcgttatacggcaaggaaatggataacgcatccgtcaggcacacgtttgattttctggaagaacacatgttgtatccgtatgtggaagaattggcgcatgacgctgccaaattttacatgaaacacggacagcctgaaaaagcgctcacgttttatgaaaaaatggtgcacgcccaaaaacaaatccagagaggagattgtctatatgaaatctaaactgttgtcaggattgctgcttgttgctgtcgggttcagctttacacaggtgatcggccatgaaagccatttggaaaaccaagcggacggcacattccatattgccgcacgcaaccaaacataacataaagacccttctttggaagggtcttattttttgcatgcgtgtccattccaattttatccgaatgcagggtcgatatgctcaagttatctgtcctacgaatgccacctattgatgaaaaaggcataaggagagatgaagagtggggattgaagtgaaaaaacggctcgtatcggctgataaatatgcgttaaaatgtccgaatccgatgacgccggagtatattaccattcataacacggcaaacgacgcatccgccgctaatgaaatcagctatatgacgggaaacagcgaatcaacgagctatcattttgcggttgatgacaaagaagtgatccagggaattccgttggaccggaatgcctggcattcgggagacggcacgaacggtaccggaaaccgcaagtcgattgctatagaaatctgttacagcaagtcaggcggcgaacggtacagagccgcagaagaactggcgattgcgtttgcggcgcagcttttgaaagaacggggctgggggattgacagaatcagaaagcatcaggactggaacggaaagtactgcccgcaccgcattttgtctgaaggccgctgggatgaagtgaaggcgaagattgaaaagaaattaagcggaagtatgccggcgaaaaaagcctctatttcttcttccgcgtctgaataccatgtgaaaaaaggcgacaccttatcggaaatcgccgcatcgcacggtgtcagcgtaaaatcgctgcaaagcatcaaccatatcaccgatccgaatcacattacagtcggacaagtgatcaagctcgctcagacgggttcttcttcaaaaagtcaggctgtgtcttcatatccgcttccatccggtgtgatcaaagtgacgaaaccgctgacgaaagggacaaacgtaaaacaagtgcaaaacgctttatccgcactttatttttatcccgataaaggagcaaaaaatcatggggcggacggcgtttacggcccgaaaacggcaaatgccgtaaaacgttttcaatccgtcagcggattaacggcagacggaatttacggcccgaaaacgaaggcgaaaattgaagaaaaactgtaatcaagaaaacggaagctccccgggcttccgtttcttcttacatacaaactgcggcaagggccttttgaatatcataaatgctttcatcttttttaaactgctttgagacagcgggaagttccgcgcctgaaatccaaattttcagctctgaatcaaggtcaaagcggccggcggtttctacgctgaatctggaaatgctcttgtacggaatggattgaatctccgttttcttccccgtgagtccctgtttatcaacaagaataagacgcttatccgtaaagacaatgatatctcggacaagcttaaatgcggcattgacattctcgccttccagcaaaatacgggccagttctgattttgcttcagccgtcgatattgtcgacgcattgcccagcaatccgttgatgaaccccatgatatctcctccctgatacgtattctatcaaatcatactataaaaaggtttccattcccagatgagtagagtaaactggtgctgactggaaaaggagagcatgttacacatgaaagatagatatgacaatttcgcagccctttccgctgctgaatcggaatacagaattatttatgaagaaaaagagggaagtaaatgtatcgtcctcgctccccacggcggcaggattgagccgggtgtcagtgagctggtgcatgcattttctgaccaaagctcaatttatttatttgaagggacgaagcggtgcgataaccgttctctccacttgacaagcacacgctttgacgagcctctggctttagaaaaagtgaccgcccatcattacgcattggcttttcacgggtatcatgatctgaaaaaggcaaatacactcgtcgggggcgcggatctggaaaaagcaagactgatttgtgatctgctgcgtgaagcgggatttgatgccgagctgacagagaagaatgatcggctggcagggttaaatcccggcaacattgtcaatcggacaaaaaggaaaatggggctgcaattggaagtgagcacggcgcagagacacgcgctgttcagcaattttggctgccggggagaaaaatacacgccaaccgatctgttttttcggtatgtagaaaccgtgaaggccggtttttatgataaatgaacagggggcccgttcttacattcactggagctatgcggcgcatgaagtgcttggcgggcagcacggtgattacagcgtcatgatgcaaaaaccttttctccgatgtcaaaatgatgacattctgccggctgtgttctaagccggcggagaatcgctaattttcaataaaatacggcgttttttcttcagcggcatgcaagtgtgtctgtccgcttccataatacacattcggccgcttgtcggataacagacaagcgagccgcttctgaaattgaatacctgctttacgccgttcaaacagctcgagccttttttccgcaaatgatgccgtcacccggaaagcggctgcgattaaaataacggcgtggctcctccgctggggcagctccatgtttaacagcataaaggtcggcacacagaagtggtacataaaatggttggcctgaaattcctgcagttccctgaacagcttgttcatatgaaaatggttcccggtatgcttcagcacatggcacagttcgtgcgcaaaatcctgccattgctcttcgggtgactttttttgattcaggacgatgctgtacatgccgtcccgcttcagcatcatactgtgcgtatcttcaaaatgaatccaaatgtcaagctccttggcaatcatctgcatatcaatatggagaggggcggtcattcccatgcggcaatataagtttttgacgtattcctcaagatgtgttaaaaaatcgcccaattgaatacaccctttcgaacatatgttcttttttaagcgagaaagaaaagccctgatcggactttgaatcaattcccttttcttttaaaaataaacattcagcttttatatcggctgaacgttaagcagtttaaaggaaaagagcggattatttatgtttcggcctgcggtttttctctttttcttttaaataattaatgaattcaatggcctgctgcttgctttccggggaaaagtcctgcatgtcccgatatgcgatctgcaggtcgggatcggcaaacatgtcttcatctgaaggttcttttccggttaacaaataatcagtcgacactttgaaataatccgcaagcttttgcagcgtgtcgtaatcgggttcagatcggccgttttcataatgagaatatctggcgcgcgagacaccgatatgatttgcgacttcttcctgcgttttcttacctctgagactctttaatcttccgcctatcatccgaaatgacctctcttttttcaacaccctaagttacttatgattatagatacaaaatgtatcaaaagaaagagatgataaaaaagtatcaaaaaggtcttgatgatacgaaatgtatcgtatataatcaacatcatagggatacaaaatgtatcaaaatacgataagaaattgatcaggagggtgagagatgcagccgataatcatccgtttcagcagcaatccggctgaccagagatgtttaggaaaagcaggcggttcgatatcttttaccgcttgcggactaccggtattccgatttgataaccgattgcagtatgaacgctatataggtctgaagaaaaatggagatgtcccttatgaaacgtaaaagctacccgtttttcatctattctggattattgaattcagaacattatgacaaaatagggtccgccatttggctgtttttatggttcatcagctcaacgacaaaggaacatgtaaaagacggcgtaaagtgggggatcgtcctcggacataagcccgtaaaagcaagagaaatggccgatgtattcgcggtcagcgaaaaaaccgtcaggcggtggctcgagagcttggaacagcatgagtatatcaaaaccgtccgcgccccttacggactcatcgtctccgtaaagcactcgaaaagattcacgccgaaaaagacattaacccgcccggaagcaactgaccggacaatatcggcggatcaccgggacaaaaatgtccggagagaaatagatataacaaaaatcatactgctgaagaagcgattaacgacattgctgcccattttatcagattaaggtctgcacaggaggggcggagcgtatacccgtcgccccgggattatcaggccatcgcccgtattgtttccctcggtgcgtcagcacaagaagcaatcaaatggctcggcgaatgctttaccgcttttgaacagcggcgcacctcttcagctgaaacgatcaaggctttcagctattgcgccaagtttatggaagaccgcttgaatgcacgaattgcgggaaggacaatcacaacaaaaaaagagaggaatacgatacatgacaaaacgaacgatcgagcagattcttgccgacctgaaaaacggaaaacgtccattactggcggacagaccggaagaatcagacaaaagccgctttgactgcccgctctgtaaagatcagggcggttatctcaaaaaccagctgggaatggaagtatgggttaagtgccgctgcgccgccgaacggaaagtagaacgcattctcggcgcaagtgagattacagatgcctttcggaagctggatttcaaaggatttatcacgcggggcaagcctcaggcagtcgtcgacgcatatgagtgcgcccttgaatatgttgagaacttcgacaagatgaaaaactgccggaaaaacagcattgcccttttagggcgtccgggatcgggaaaaacccatcttttgaccgctctcagcaattatgtcatgagacagaagcagacaccggtgctgtattttccttttgtggagggctttacggatttaaaaaatgattttgatctgctcgatgcaaagcttggccgtatgaaacaggcggatgtgctttttattgacgatctgttcaaaccgctgaacggaaaaccccgggcgaccgattggcagattgaacaaatgtacgccgtcgtgaattaccgctatttaaatcataagccggttcttatctcgagcgagctggcctgtgacggattggtgcaggttgatgaagccttgggcacaagaatttatgagatgtgcagcgattatttagtcatcattaatggcaattcatttgacgtaaaccacagattagagggggcgagataatgtgtaagctgtgcgggccgaagaaggtcattgtgatggaaacgggtttcggcgctgtctttcacccttgcccgaactgcaaaacaggcactgatttaacgccggtcattaaacggcttgaacgaatggttcaagacgcaaaagcgaggcttgatgcacgtgtgtaaatatatcaaatggcttttttgcctgctgttcagggcaaaacggatagaaaagcaaattgaagcatggcatgaggctgatggaaagtgaggatcaccattgcaagaaaaaaacagccccgctccatggcgggccgtacacagcggagaagaaaaacccatttacatttattccgcttacagcgaagcggataaagagaagttcccttattcaaacggaaggctcatcgcggccgttttcaacttaagttcatactcacagcagatcaacgcggcattgatggcgaaagccccggaactctttgaggcggccgaaacggctctccgcctgctccggggagaaagttctgaagaaaaagaagcgttcataaatgagctcggaagcctcatacatgaagtgaacattttgaaaaagatggaggaagtaaaacatgaatcctaaaaaactgactgacattgaacatacaacattaaaaagccagctggaagaaggcaaggttcgggtgattatagtagacggactgaagaaggaagcatggctcgccgaagcgccggagcacggcaaaacgcttgtcgaaacgcgaaaaggggatctggcccgggtcgaatatgaaatcggctttaaattgaattaatcgaaaaaaacagaatacgtccaagacggaaagcctgcggacactgatcaatcgcgcacatgctgcgcattgattggtgtccttttttgttccgaaaaagaggaggatctacatggaagacttactatttgaatataaacgcacgctgaaagagacgaaaaagtggtacaagcagctggaggcagcggatgaaacggtgtttacttcagaagaactgaaagataaaaaaatcatcagaacgattattacagatttggaatatgtcatcgaatggcttgaaaaaggccggcagcccggcataagaagagcgatagaccgcagagacgcttatcagagaatgctcattaaagatccgagaatcatagaaacctattcgcaggcgctgatgtttgaaccgtccgcaaatgtgactgaagaagacagaatcagactgcgggacgcattagccgttttaacggatagagaaaaagaaatgctgctgctccacaaagcggaatgcttttcgtatgaacggatcgccgccttgctgaatgtaaagaaatcaaccgtacaaacgacggtcaaacgggcgcttctgaaaattcaaaaacagcaggaacaaagaaatcaatcgcctgcttcataagttgtcatacgtttgccacctagaagtgaacagacgatcacaaaaagcggcccgattagaagccgctttttattatagacaatcatgtcggaggtggcggtgatgccgtagcatgaaaaacgcaaaaagagaacaggcatttacaatctatcagtctcataaaggccgcatcacaaatcgcgcccttgccggcaaatcaggcgtatccgcaagaacaatcggcagatggaaaaaagaagggcgctgggacgaggcgcttaaaaagaacgcggaaagcggcggaaaaaacaacccgggcgaaggtgatgagttaaacgaacgccagcggctgttttgtctttattatgtgaaatgctttaacgccacccaatctgcgataaaagccgggtattcaccggaaagcgcgcatgtgacgggaagcaggctgttaaaaaacgaaaaagtcgctaaagaaatcagccgcatgaaaaaggaaatggtcaataaagtgtttgtcgaagcgatggacgttcttcaagtctatgtgaaaatcgctttcgctgacattaccgattatgtaaccttcggaaaaaaagaggttcaggccttcggaaaatcagggccgctctttgacgagaatgataatccgattatgcaggagatcagctacgttgacgttaaagattcgcaccttctggacggaaccatcgtcacggaagcaaaactcgggaaagaaggcattgcaataaagcttgcggacaagatgaaggctcttgaaaagctgtccttgtactttgaccttttccctgaccaatttaaacaaaaaatcgaaaatgaaaaattaaagctggcacagcagaagatggaaaaaacagaagacagccaaaagccgattgacattgtcattacgcggaaagaggaacggccatgattgaaaaagcggtcaacccgcgctttgaagattatttgttcaattggaatgaaacgtaccaatttctcgtcggaggctacggctcgtcaaaaagctatcataccgcgctgaaaatcatcctgaagctgcttcgtgaaaagcggacggcccttgtcgtgcgggaagttttcgatacgcacagggattctacgtttgccttatttgaagacattatcacggagcttgaactgggacatgccgtaaaggccgtttcttcaccgatgcagctcagattttcaaacggaagccggattatgtttaaagggatggacaacccggccaaattgaaatccattcatcatatttcactgatttggattgaagaatgctctgaagtgaagtatgaaggctttaaggagctgatcggccgtctgcgtcatcccgagctttcgctgcatatgatatgcaccacaaatcccgtcggcacctccaattggacgtaccggcatttttttcgtgatgaccaaaaaaaacggttcgtattggatgatcagacgctgtatgaaaaaggcaccgtcgttaagggagatacgtattaccaccattccacagcgtgcgataatctgtttttgccgaaaagctatattaagcagctggacagcttacggcattacgatcctgatttgtaccggatcgcccgcaaaggacggttcggcgtcaacggcatccgcgtgtttccgcagtttcaggtcatggagcacaacgaagtaacggagcggattgcgtccatcaggcgccccctgtttcggaccggcatggatttcggttttgaagagtcatacaatgcggtcatccggctagccgtcgatccggatcaaaaagagctttatattttctgggagtattacaaaaacaaaatgaccgatgatcagacagctgaggagcttcaagaattggcggatcaaaaagagctgatcaaagcggattcggctgagccgaaaagcatccaatatttccgcaggcagggattttgcatggttgcggccaaaaagtttccgggctcaagacttcagtatacaaaaaagctgaaacggttcaaacatatctattgctcagacagctgtgaaaatacgatccgcgaattgcagaacttaacgtacgcaaaaaacaaaaacggcgttctgtcggaagatgagttttcaattgatccccacacactttcagccatttggtatgcgctggatgactatgacgcggcggatctgaaagatgcatcacaaaaacggagacgtccgaatcgggaaaggaggagataggcgttgcctaactatcaaaacgttagagccaccgtctttaaatcaaaaatggccgcgccgcaggcaaggcagatgaacgaagatcaatttgccgatctgtacggcgaagacatcatttcaccgccctataatctcattgaactgaaaacaatcgccgaatactcgacgattcttcagcagtgcattgacgcgtatcgggtcaatattacgggttttgggttcgatgtggaatatacctttgatgtaaatagcccagattgctcaccgtctaaaaaggcccgggccgaaaaaaactggatgaagctggagagcttttacaaatgtcttcattttgatgaatcggccgagacggtcctcggatatgcgatagaagaccgcgaaaaaacgggcaacggttttctcgaagtgcttcgggacggcgcgggaaaaccggcggggattgaatatctggatgtgaaacatatgcgcgtctgcggtgtgactgatcccgttgaagttacattttcatatgaagaaaacggcgcatccaaaacgattaaaaggcaaaaacggttccgtaaatatgttcagatgctgaacggacggaaagtgttttttaaggaatacggcgatccccgcatgatggacatgagaaccggtgaatacgtaaagaccctgtctgaagaataccgggcaaatgaagccattcacttaaaaatcggcagcggcacttacggcattccgcgctgggtcggcaatatcgtcaatctgtacggcgcccggaaagcggaagaactgaattttatgtatttcaagcagggccgtcacgtgccggccgccattacggttgaaaacggcatgctgtcagaaacctcgtacaaagagcttcaggattatatgaatgacctggaaggggtggaaaacgcccacaaatttctgctgattgaggcggaaggcattgcgaaggaaaaagaccttcacggaggcgaagacattacgcccgtgtctgtggaaattaaatcacttgcggaaattctgcaggatgatgcgctgtttcttgaatatgacgacagaagcagaaataaactccgttccgctttccgtctcccgccgctttatacgggagaggcgcaggaatacaacaaagccacagccgatacggcacggaaaataacggaggagcaggtgtttcagccggagcggaaaacgctgattaataagctcaacacgttatttttgcctgaactgggtctccacgatgtacagctcacattaaaagggcctgattttcgcgatccgcttgaaattgcgaaggtgcttacgccatttatttccgccggcgcggtctctcctaatgacctccgtgatctggcgggaagagtgctcggcaagacgcttgaggaatggcctgaagagtactacagccggccggtgctgaaagggaaataggagcaatcctgaaagggggtgaaaacatctcgtgccgagagaattgagaaatgccgtcatcagttttgtgagctatgtcgataaggcggcgaaccaaacggaattcttttttacaaaatcagccggaggccttccgtcatttgaaaaaaaggtgcaggtgtttacaaaaaacgaatcggatgagcagaagcttgtttacggcatcgtttacgagccggatgtccccgatgcacatggcgattatatgacggctgaagagattgaaaaggccgctcacggttttttggcggacgcccgcaacatcgatacaaatcataattttgaaggcgggaccggcgaggtggtggagtcgtacgtcgccccggatgactttgaaatcgggaatgctgtgatccggaaaggatcttgggtgcttgtcaccaaagcttccgatgaagtatgggatcagattaaagccggtatcattacgggctacagcatggcgggaaccgctgacgtttacgaagagccggcagaaaagcaagccggcttattcggcgcagtcaagcaatttctcgaccgtgaccgcaaatcaagaaaccgcaagggagaggacttgaacaagatgagaaaagaagacgtaagagaatcgattgaacacgcgctgcacccgcttttaaagcggcttgacagtttggaccagaacacggaagacaaagacggggcggctgcgccgtctgatgaagaaaagctgaaaacacttgttgaggacatgctggcgccgattattaaacgcattgaagcgcttgaaaaagtaagaggcgcatcaaagcagccggaagaagagacgggcggtcaagagcctgttaaaaaatccatttggagcggactgctttaagcccagtcagaaggaggaactgtagagtgagaaatcaagatatcatcagaaaggcggaaatgtcactttccgctttaaaaagcggcggtttaatgaaccccgcacaagcttcagcatttatccgcatggtgcagaacacgccgaccattttcagcgaatcgcgtgtgattcaaatggaaaatgactcgcagaaatttgaaaaaatcggtttcggccagcgtattctgcgtgccgctgaggaaggaaaagccttaactgacgatcagctgaccgtcccgtcaacaagtacggtgcagctgaatacgaaagaagtcattgcggaaattaatatcacctatgacacgcttgaaaacaatattgaaaaagacggcctgcagcagacgatcatgcagattttggcggagcgggcggcagtcgatattgaggagctagtcgtaaacggcgatacatcttcttctgatccgtacttggcacagcttgacggaatccgtaagcagactgtatctcacgtcattgacggaaacggggaagagctgtccagagccacatttaaaaaaggcttaaaagccattccggcaaaatatttgcgactgcctcaggaattcagattttacacatctcaaggcatggagattgaatggaaagaccgtgtggctgaccgtcagaccaatctgggagatcttgcggtgcagggcggtttgtcttcagcattcggcgttccggtcaaaggagtgtccaatctgcagccgtactcagtcggagaaggtgattcccagtacgatgcgtctgacatcattttgactcacccgaaaaatatcattctcggtttttcaagaaatatccgaatcgaagtagataaagatattcgcagccgcaaatttattatcgtactgacggctaaacttgacagcaaatttgaagaagaagatgcaagcgccaaaatcgtaaacgttaaagaataagacgggggtggcagttatgttaattcagccgtctgacgttgtttcatattcagtttatgatcaagtcaaaaacaggccggagccgcttcttatacaggacattctggaggcggaggcggaggcggccagaatggcggggcattcgttcactgaccctgtttactcaccgcttcccgaaaagattaagcttgcgttattaaagctttctcaatattttgcgctgatcaaccagaatgaagcagccgcttccgcctatcaatctgaaaagataggcgactactcgtatacggtggcaggtgaaggcggaatcagaaaaccggcggtgcaccatctgctctgtgaatatatcgcgccgggttattctccggtttctgcacacgcaaaggtgagacctttatgagctacgaacggctgctcactgacagatgcgatatttatcatgagacggtgtcagttccgaaggccggacgcttcgggattcccgccgaaaagctccagcctgtcttttcttatccggaagtgcccgattatgaagacgtgccgtgtctgtttgttgaaaaacagcagcagcttattcagcttgagcctgatcataaggtatatcagcggtttctcgttcattttccgaaagaggccgttgtgcgtgtcaatgacaaaatcatttgggaaggacaggcgtatattctggaaatgccgaagaaaacaagacagcaccattgggaggttatcgctgtgagagatgacagactatgagcataaaaaaccttgaacaatggaatcggtcgctgcaaaaggcatcatccggagaatttgcccgtcaggcaggcgaatggctggaacagtcaggagaggattttctcgacttggtacgggaggagcttattcattcgggcgggattgatacagaaagcctgctgtcttctttccggaaaggagcgcaggatcacgtatggatcattgaaaacgggggactgacccttgaaatcggcaccaatgtagagtatgcctcattcataaatgacggacattggaccgtctcagatgaaaatgtcagatgggtgcccgggtattttcaaggctcccggttcatctatgatccgtcagcttcaacgggaatggcgctcaaaaaacagtggatcagcggaaatgggttttgggacaaagcccttcttttgtatgaaacactcttcgccgaatcgctggacaagcgtttcaatcagtggcttaacacgttggggggagatatcggatgaatcgcgagaccggttcaatcgccgcttttttgtatcagcagtgcggcgtgcccgtatatgaaaatgaactgcctgaacaatttcaggtgccgtcactttacatcccgcccccgtatgcttttgacgagaatgacacagtctccacctttaagaagacatacagtctgaatgtgaagctgttccatgccgactcggtgcaggccctctatgcagccgacgggatcgccgatgcggtgagagaatcaagacagctgattccgctgcttacggaatcaggggaggataccggtgatttcgtccgcatcagccgtatcgaaacaagagtcggagacaaaggcgaggcagtgatcaccatccgctggacgagccgctactactatcaaaaacaaacatctcccgcactgcgggatgtggacattaacagcggggtgaaacaaaagtgaaacaatataaaaagaaaaacgccgcaacggcggaacgagcggttctttatgacacggcggatttaacaaagcacgcgaaggagcttttcggcgtaaaacccgagattctccagggtgctttattcggcgtgaagcaaaaacaaatgacaaaagcgcaagccaagtcttacattgaagcatttttaaccaaggaggtcatgcaataatgaacggcggaacatttacgcaaggaaaagaaaaagaacgtgccggaatctattttaactttaaaacaaccgcccaggagcgggtatcgatcggtgaacgcgggattgtcgcccttcccgtcgcatccggctggggggaagcgaaaacattcgtttccatttcaagcgttgaggatttgaataaaaaagtggggctcagtattgaagatccgtcactgattctgcttcgtgaggcgaaaaagaaagcaaaaaccgttttgatgtaccgtctgacagagggaatcagagcgagcgcagatctttcgcaaggtgttaaagcaaccgctttgtacgggggttcaaaaggaaatgacatcatcatccgcatcagtgaaaacgtccttgatcagaccgctttcgatgtgaccacttacatggatgaagcggaagttgacaaacaaacggtgaaaaaagccgaagaattaaaagcaaacggctatgtcacatttacgggaacgggcgaactgtcggcttccatcccgctgacaggcactgaggaagaatccggggaaacgttaaacccgcaggcaggcatccgtctcgcgggaggaactgataaagcaccggtcaactcagactatacggattttttagctgcggctgaaacggagaatttcgatgtcatcgctcttcctgtcgcggaaaacgatcagctgaaagcgacatttgccgcattcattaaacgccttcgcgatgcgcagggacagaaagtgcaaggggtgaccgcccattacagcggggattatgaaggcattatcaatgtgactgaaggtgtgctgctggaagacggaactgagattaaagctgaagatgcgaccgcctgggtggcaggcgcaagtgccagcgccgcatttaatcaatccttaacattcgttgaatacgaaggcgccgtcgatgtgctgcaccgcttgactcatgatgaagtgatcgaacgtctttccaaaggtgaattccttttctcttatgatgcccgtgataagtcagtcagcgttgaaaaagatatcaactcattggtgacatttacggcagagaaaaacaaaaagttcgcgaaaaacaaaatcgtccgtgtgcttgatgcggtgaataacgatttgacacgtgaactgaaagccttaattaaatcgaaaaaaggcaccggaagcgatcttcctgcgacaaatgacggccttcaattcgtcaaaacgatgattattcaatatttgacaacgctccaggatgcgggcggcatcgctaactttgattcagacaaagacattacaatcgggctgaatgaagaccgcgacggctttttaatcgatctcgccgtacagcctgtggatgcggcagaaaaattctactttaatgtggaggtaaactaagatggcattaaaagcgcaaaacacgatttcaggaaaagaaggccgtttatttctcgacggagaagagatggcgcatattaaaacctttgaagcaaacgtggaaaaaaacaaatcagaagtaaacatcatgggccgccgcatgacgggacataaaacaacaggcgccaacggaacgggcacggcaacattctataaggtcacatccaaattcgccgtccttatgatggattacgtcaaaaaaggcagcgacccgtattttacgctgcaagccgttcttgacgacaaatcatcaggccgcggaacagaacgcgtcaccctgtatgacgtcaactttgattctgcaaaaatcgccggactggacgtagactcagaagccctcgaagaagaagtgccgtttacctttgaagatttcgatgtgccggaaaagctttctgaaacgttttaaccagaatcattgtgagtgaaacaggccttttataggcctgtttttttataaaaaaagagtaagggagttttcatcatgagcgaaaaaaacgaacaagtatatgatctgtcattctttatgccgggtaaaacagtcgaggctgaggagatccgggttccgctttcaaagcgttttgtcgataaaaaaggaaacatcgtgccttttatttttaaagccattacgactgagcgcattgacgaactggagaaggaaagcacgacatataaaaatgtgaagggcagaggccgcgtaaaagacttagacagccagcgcttctatgcgcggatcgcggttgaatctacgatttaccctgatttccggtctaaggagctccgcgacgcttacaaaacggcagatccggtcgaggtggcaaaacgcgttctttcagtcggcggtgagtatgcaaattggctgaataaagcgattgagatcaatggttttgaagatgaattagaagatctggagcaagaagcaaaaaactgataaaagatgggaataaggaagccgtgtatctctattacgcgatgcatgagcttcattattctccatcagaactgaaagagttatatgaagcaccgagacattttaaggcgctgttgtacggtttaatcggttacaagctggacattcttgaaaaacaagcgaagaaagggggagcgacatcatggcaaagctgaccgcccgttttgaattggaagatcgggtttcaaagaaaataaggaaaatccaaaatggcttcagagcgcttgagaaatacaggaaaatgacaaaacgccaaagtgaaattgatatacgcaaagagagtaaatctgttttaagaacaattgaccgcatccagcgctctatgaaaagaaagctgggcgcacaaatgatctctatttcagctgaagacggagccagtgccgtcattcaaaaggtgcaagcccaattagcgggtctgcctgcgtctttaaccgttaaaataggagcaaaagacagcgcgacagcggcatttgagagattgcgggatctggctgccggttttaaaggatttaccgtttcactgtatgcgtcagacgaagtgactcctgccatggaacgtatcaaacgctacatgcaatctgcgttaaagaacgggtactctgtcactatacgcgtcatagatcacgtcatgaaaacagtcggccgaatttcagcggggattgattcgctgacggggaaaaacaatgtcattcaattatcgttaaacgaaaaggtgacagcacagctggctgcaatgcaaaagaatatgccggacgtcggaaaagcttctgcatctgctgctcctgcttcgccgaaaaatgatttttcaatgcttgactccattgcagacaccttcatgaaaaaagtcaatgatatcgcatccaaattttatccggaaacaatcatagcggaactggataaattcgctgcaagctttatgaagaaagcggacgaaatcgcgagcaaattcagcccggagacaatattagcagagctggataagttcacgacctcattcatggggaaagtggatgaaatcgcaagcaaattcagcccggcaacgatattagccgagctggacaagttcacgacctcattcatggggaaagcggatgaaatcgcaagcaaattcagcccggcaacgatattagccgagctggacaagttcacaacctcattcatggggaaagcggatgaaatcgcaagcaaattcagcccggcaacgatattagccgaactggacaagttcacgacgtcattcatgggaaaagtggacgagattgcaagcaaattcagcccggagacgatattagcagagctggataagttcacgacctcattcatgggaaaagcggacgagattgcgagcaaattcagcccggcaacgatattagccgaactggacaagttcacgacgtcattcatggggaaagcggacgagattgcgagcaaattcagcccggcaacgatattagccgaactggacaagttcacgacgtcattcatgggaaaagcggacgagattgcaagcaaattcagcccggagacgatattagcagagctggataagttcacgacctcattcatggggaaagcggacgagattgcaagcaaattcagcccggagacgatattagcagagctggataagttcacgaccttattcatgggaaaagcggacgaaatcgcgagcaaattcagcccggcaacgatattagccgagctggacaaattcgctgattcgtttatgaaaaaggtagacggggtcgtgagtaaattcagtccggaagccatattgaaagaactggataaattcactgattcatttatgaaaaaggttgatgacgttgtcagcaaattcagtccggagaccatattgaaagagctggatcattttactgattcgtttatgaagaaagtcgacgacgttgtcggtaaattcagtcctgataagctaatcgaccgcgccgaacaatttgtaaatgacacgattgaccgaatttctgagaaattcgattttctcaatccggataagattctggaaaaagtggagcagtttacttcctcactgttcggaggcattgataaaaagttcggcaagttcagccctgatgcgatcatcgaaaaagccgaggcatttgttgataaaattgtcagcaagattgccaagaaatttgagaaattcagcccggacaaaatcatcgaaaaagccggggaattaatagaaaaaatattttcaggaatcgctgaaaaattaggcaaactcaatatcggcggattattaggaggcggcacgaaaaaagaaaagagtaaggggagcctttctgccggcggcaccaacagcccgaagcgtcctgagctgacaaagggtccgcagcgcacgggaccatcaccgaaatcttcaggaaggtcagccaaaaaaaccggcggggctttggggggcggctgctgctgtaccggagtgacgaggggcaaaagcagtaaagtcgaagggcggaataaatcttcgaaaagaggttcctccgtaaaggaaagcaaacaggcatccgtaaacacgccgaaaacaaaaggggcaggtaaaggcatcggcgggcttttgaaaggcttaggagattcaaaggcgctgaaaggcggtatgaaagggttaaaaggtgccgctaaaggaattcccggcataggtgaattgttatcacttactgatttagccggcatcaataaagataatgcaggagagaaggtcggctcagcaggcggcggtcttgcaggagccgcggccggagcggcaatcggcagcgttgttcccggagtgggcacattaatcggcggcgcggtaggcggcatcgccggcagtttaggcggttccagcttgggagaggcctttgattcaggggctttgaaagacacatggaatgatatttccgaagcggcgcaaagtgcttggacaacagtacaagatacttggggaagcgtttcatcctggttcatggaaaatgtatggacgccggtttcatcagctgtcgccggagtggcgacaagcatctggtcaaatatcgtgaatgcatggacgacgattcaagggattttcagcacggtgtcatcctggttcatggagaatgtatggacgccggtttcatcagctgtcgccggagtggcgacaagcatatggtcaaatatcgtgaatgcgtggacgacgattcaaggtgtcttcagcacagtatccggctggtttatgagcactgtctgggagcccgtaaaatcggctgtcgtcggagtagcgacgtccatttggagtaaaatcacaggagcttgggataaaattaaatctgttttcagtacggtatccggctggttcatggatattgtctggaacccggtgaaaaacatggtggaaaaagtcggaaaaggaatatcagacgctttcacgactgctttagatacggtaaaggatatatggaaagggttaagcggctggtttgagaaacatataaaagaacctcttgtaaaagtgggaacagccatatcagatgctttttctgcagcattcgactgggtgaaaaagatttgggataaaaccggcggcaaattgatttcaggcgtaatggactttgtcacaggaggcggcggagataaaaagaaaaaaacggacaaaaacgccacgggcggctacattacaaagccgaccatttcctggatcggtgaagccggtaaagaatttgtcatccccgtcgacaacaatcgcggccgcgggaagatgctgctttcacaagctgcgtctaagctcggcatgcgtgttgtcgatgatatgggcgcggcttcggctcagtcttccgctgtgccggcgggagcgggcggtgtttcttcttcggcgtctgtatcggccgctgcgtctgtggatgcttccggatttgcggggacggcttcatcactcggcaaacagtttactgaaggctttgacagcggaatcagcaataaagcggtggatatggacggctggaaagagaaaaacatcggaacgccgtttaacgcccttatttcgtcttcgcccgattacggaaagcaagtcgctgcgggctatgccaaaggtcagaatacatcgccgacgggcaccgattcgtttttaaaaacaaaggtgaaaacaccttatcaatcggaggttaatcaatcgtcatcatggggcgccgccacagtgaaaggttattcggccggacagaatgcaaaagatacgggaacgtcgcaatacgtaagcacacatatcaataaaccgtttgttcaatcaagagattccgcgaacggctgggggtcaggcctgatcggacacttcgtatcagggatgactgcaaaaggaagcgaagtcaaacaggcggccaaagatatggccaaaaaagtcgaggacgcattcagggaagagcttgatattcactctccttcccgtgtcatgatgagtctcggacgctttgcttcagtcggcgtcgtcaaaggtctcagctcagttgacgtgaaaaaatatgcggaaaaacaggcaggctcgcttgcagcagccttttccggcatgggtgcagcgggaggaagcgtcaaagaatggcttttggccgcaatgaaagcaaccaatacgccgatcagctggcttccgggattaatgacgatcgcacagcatgagtcaggcggcaaccctaattccattaatctatgggacagcaacgccaaagccggacacccgtcacaggggcttatgcagacgattccgagcacctttgaagatcacaaagcgccgggcatgaatgatatcagaaatccaatccacaacgccgctgccgctatcggctatattaaaagccgatacggctcgatcagcaatgtccccgggattaaaagtatggctcatggcggcccttacgtcggttatgccaatgggggtctgattaccaaggagcagatcgcccgtgtcggcgaagggaacaaacgggagtggatcatccctgaagagcggggcatccgcggccgttatctgctgcaaaaagcggctcaggcgctcggcatggaagtgtccgatccgtcccggacggaaccggcggcgctttcagccggcacggtttccgcagccgttaaaggcggcggccaaaccgttcaaaaaacgggaacaaaagaaattaaaatcgaattcagcggcgatcagcatttccataacgggcaggacgccgagagcctagccgccaaaatcaaacaggcgctgattgatgaactgcaaaaagacatttataccggagcaaagggggccgttgcttttgactaaatctgtttacgaattttggctgtctcaagggaaggacaagctccggcttcccgttctccctgaagcgattgatatcgcaaacagcgtgcagaatgattccgtgaaagtcaccggacttggagaggtgacgtttatcgaagaaccgggagcgaaagaaatttcgttctcttctttttttccgaaacggtacagcccgattgccgaatatcaaagcattccttcaccggaaaaagccatttcagccattgaagcatggatgaaagcgaaaaaacccgttcagtttttgattacagggacaaaaatcaatgtcacatgcagcattgaaagctttaattacagcgaaggtgacaatgaaatcggcgaccggaattttgatatcgtactgaaagaatataaaaccgcttcgccaagaaaaatcaaacaaaagaaaaaaacgaaagcgaagcgcccgtccaaagcttcacccaaaacatataccgtcaaaaaaggggatacgctttgggacatcgccggcaagttttacggaaaacacacggagtggcggaaaatctggaacgcgaataaaaccgccatgattaagcgcagcaaacggaatatccggcagccggggcattggatcttcccggggcagaagctgaagataccgcaatgaaacgggtgaaaagatgattgaactatttgtcataaaagaaacggagtggctcgagcttgtcacagaaagcgtaacgctggaaggacacagatatcaggcgccccgctccatcgaagcgacgattgtcgtaaagcagggcagccagacgtattacggcgtatcagaaggggatacggttttgttcaaatggaacggaaaagagctgttccgcggcattgtttttgcaagaacgcccgatgagcataccgtcgccttcaccgcatacgatatgctccaataccttgtgaaaaaccaggacgtttacgtgttttccaacaagcgcgctgatcaaatattaaaaaggatcgccagcgattttcaaattcccgtcacatccattgccaacacaggccatactattaaatcactcgtttttaaaaatgatacaagcctttacgatatgatgctaaaagcgttaaagcagacaaaaagccagacggggcgcaattatcagctctattcagaaaaaggcaggctcggcttgcgtgaatggccggagccgtctgacatatgggtgctggaaacaggagttaatattacagggtatcaatacagcacctcaattgatgacaccgcaacccgtgtcgtcatgcggctgcaaaaagacaataaaacgataaaggcttccgcctcagacagcgccggcatgaaaacattcggcgttttgcagtataccgaaacggtttctgacgacattaacgaagcccagctgaaacagcgcgcaaaagtgaagcaggctgagaaaaaaggcattaagaaagagctgaaaaatatacaggcgatcggtattcctgggttggaaagcggattgcccgtctatatttcaattccggaaatcgggctgaagaaaacctattatgtagatacggaccgccatgaattccaaggaacaaaacataccatgacgattgacgtcacggagaaaaattcacttccggaggggacagcctgatgagattaagtgatgccattaaacatttagccgtcggagcggttgacgctgaagcgccggtggagctgatgccggccgaagtgacctccgtttcgccgctcgagctgaaactgaaagatcacgacaaacttttgattccgtctgatgcactcattgtgccgaagcggctgagatccggagaagatgatcagctccaggcgggagatcgggtgatgaccgccgctttaacaggaggacagtctttctttgtactggacaaaatttaaccggcatccggacggagatatacgggaatatcagcctattaaagccgcttcatctgccgaagagggcttttttacatgaacaaatctaaaaggagcgggtgcaatggccctgacaccggaaatcgaatttgaagatttggaggatgcgagtgaggctgttgagacttcacaaacctaccgaattgactttgaaaacaaccggattaccaatgaactgataaacggactggacgcaatcagacaattcgtctatatcgctcttcacacagaacggtattcatattcggttttcagccatgatatcggaaacgaacttcaggaagtgctttcagatcagaacacgacggatgcttataaaaaaatggagattccaagactgatagaagaagccttgctgtatgatgaccgtattttggccgttaccaattttgagattgagaaaaaagatgatgccttcatcgtctcttttaccgttgaaactgatgagggcatgcttgagatagaggaggtgctgggtgaggatgtttgaagctcagacgtttgacgacattatggacagaatgctggcgcgcgttacggcggatattgatacgagagaaggcagcgtcatttacaatgcgctcgcgcctgcggccgctgagctcgcaaagtcttatatttggctggataccgtgctggagctcgtgttttccgatacggctcagggtgaatttctggacaggcgtgctgctgaggcgggaattgaacgaacacctgccactaaagcggtcagagccggagaattcacagcgggcatcaccattccgccaggctcccgtttcttcgttgataacctgtattttcaatatacgggggatggaacgcttgaatgtgaaacagccggtgaagcgggcaatgccggcatttcggggcagaacctgctgccgcttgatacgatacccgggcttgagaaagcagtcatgcgcgatatattaattcccggccgtgaggaagaagatgacaacagcttaagggcgcgctattttacccgtgtccgccgggaggcagtcagcgcaaataaacagcattataaacaatgggccgaagagattgacggcgtcggcagggcaaaaatcttcccgctttggaacggagacggaacggtgaaagttgtcatcacaaatgcgaatttggaaccggcatcagatattctgatcaaaaaagtaaaggattatattgatccggacgaagggcagggagaaggacaggcgccgatcggagcggcagtaacggtggaaagcgcagtatggaaggaaatcgaaatctccgcttccgtgctgcctgagctgaacagctcgatcgatgacgtaaaagcggagattgaaaaaggcgtactgaatttattcaagaaaatggcctttgaagaaaacaccgtccgtttatcacaaattaacaacatcgtttataactcggcatccgtcagtgactacgccgatattaaaatgaacggtgcggcagaaaacctcgtgctcagtgacgtggaaattcctaaactcaaagaggtgaaaatccttgagcagactcgatgagatgacggcgtacctcccgccgtttttaacccgattaaaagagatggcacaactgcttatggcggaagctcctgagtttgagcggcagaataacgatattttcgatttgacggatcagctctttatcacgacggcgacatgggggcttgaccgctgggaaaaaatattaaaaataccgcgggaatcaggtgacacggaggatatgagacggctcaggctgatctcgaagatgtcgaatattccgcccatcacacatcaagcgatcgagcaggcgctaaaccgttttttaaaacatccgtcagcttatgttcggatgtttccggggcagtatcgtttttatgccgatatcgggcttgatgacctgcagcacatgaacgagctgattgaaacgcttgaaaaaatcaaacccgctcatttggcgtatacactgagagccgcattaaacgaaacactggaaatcaaagaccgggtcattctcaacaatcggagataccgaaaagtcagtgaactgaaggtcggttattccgtcacactcaacaataacgaggtggtcttaccatgatatcagccgcttacagacagcgtgccgcagccgatctgaaaaacaggatcacaaaagtgctgttaaacggcaaagaaactccgattgcggacatttccgtaaaagatgccgcagtcaccgttctcacacgcagggaagaagacgtcaaacacattgaaaccgtgcagatgcttgacgaaacaggaagcgtcattacagaacgaaaaacaaatttagatctcagcaataacagaacgcttgatttaagatttacctttgaggtggtgtaacgatggcttacgaagaaaaaacagactggcttccggacgatccgattaatgaagatgacgtcaaccgctgggaaaaaggcataaaaaacgcccacacggatctggcggcccataaaaacgacatgaacaacccgcacaaaacgacaaaggcgcaaatcggcctcggaaacgtggacaatgtccagcaggcagcaaagaaagattttgaccggcacaatcaagatctggaccggcatgtgacgaaagaagagcgccagaagtggaataacgggcaattgtctaaaatcacaaaagatgatggctccgcttttattaatatctctgacggacaggattttcatcagaccgctgccagccagaataagacctttactttctcagcagctgcaaccggaataaataccccgcctaaaccgtcagagggtatatacctttattcttcaaagaataacggagaggcggccgctttctcagatgacgggggattttggagaaaaacgctgaaaaacggcatctggacggaatggatgccatttgaaacagctgccggagcacaagcaaaagtaaatgagcatgccgacaaaacagatcttcatgtaaccaagtctgacaaagacaaatggaatgcagggcagttattcaatctgactgacaatgacgggaatgctaaaacggtaacagaaacaaacttagacaatataaaaacgtccggcatctactatatatcagttcagcatacagaaaataagcctgcggaatacggacaattaattgtcatgcaaagaacccgcggagcatcaccgacttttgtccaaatgtttatagacacagtgaccgccggaaatcccatatacgtccgaagtttcagcactaaaggcgtatggtcggaatggagccaacaagaaacagattcaggctctcaagcaaaagtagaggctcacgccaataaaaaagacattcatgtcacacaggcggataaagatatgtggaacggcgcacagctttcgaaaataacaaacgataacggcggctatcttctgacaattggtgatgatgataactttcttgaaaaaatcgttaaaaacggcagggcgttcggcaccttttattcaaccggcaaagcggcaaacagtccgagcaacgcttcaacccgcggcatgtttcattttacctctcttgacagtgaggggaaaggaacgtttgggtatgtcattgccgtcgattataaaaataatatgttcacgaactatttggatttgaacttgggctggcagggctggcgtcgcctcgttactgaacttgatactgagaatgtaccttggataaatgttccttataaaaatggcgctaaatcaggagacaggccgcttcaataccgtaaagtgggaaacacccttcacctgaacggacacgttcttacggacagagaagtggtattcgggagtgtgccatcctcttgtgcgccggccaaaggcgttgtaacgatggttgcagccagcggcaccaccggttacagcaaatttattatctattctaatggagatatgaagctgacgggaattatggccaatatagaaaataacgtgaacggctattatattgaccttgttttggcactcacgtaaaggagcgagaatatgaaattaatatttccgtatgacaatgacaacatttatacaggcactccggttgagctttatccggattctgagacaggagattatgtgatgccgcctaacgctgcgggctttccgccggaaataaacggcgaaggcatgtggcgcccattttttgatgaagagaaacaagaatgggtggaaaccgctgacgaagcatataaagagagcttaaaaaaagatacggctcccgattcaaaccagcttgcaggcctcggcggacagctggcgaatgagaaattggccagaaaagcagccgaacaagcgcagcagtcactcggcaggcaattagcgtctttaaaactggaactcttaaacgtaaaaggagaatgaaaaaaatgaaaaaacttaacttttgggtttacgccttgttttatgagtgggcctcaacagaaatggtaaaacaggctatgggctatgatgactgctctgccgaagatctggctgaaggggtggccgcgaagtatatcacgcctgaggaatttcaagaaataacgggtgaaacatacgaaaactataaaaatgctgtgtcataagccaaacggctttttttatttgtcatttttaataaatgagaacaggaggacggccgatgaaaaagcattcatttgaatttcccgccgatcaacttggcaggcccggcgccgtaaaagcttatcgcggtaacaaaaacgattatgtcacaccggttgctgatttgtccggaatggcagagcttcttaccaatacgccgctagaagcgattgaagtctacagccaattcggacaagaccgtttaggagccgtcttaatagacagagcacaggggtgggcttattcggaccgcagcggaactctttttatcgaagagagcgaggataacaattcgtggacagcttcacattttgtcgcagtaaaaggcggagtgctgaccgcttcggggtgggtcagcctgacaaaaagatattaccggttccgttttgaaaatggaaatcaaaagcagtccgaatttgttttataccaatctgtcggtacgggcggtgatatggcgttttcatatacagacgtgatttttcatgaaaatgcagcagaggcgggcgagggaagcatcttctcagcaggcgcttggaaaaaacttctcgtcgaaatcaccggtacggctgagtcgggccatgtcgcgttttgggggagatccatctcgggaaaaaatgtgccgatcagaggaatcaggtctgatgacgggacatcagccgccggtacgtcaggcacagaagaagtgtggtcatttgatattgccggctttaaggaaatcgtcatggaaatcaagagcatttccggcgggagcctttctgtcaaaggcacggcattttcttaagaatgaagcttccgaagggaggtgagaacaatgtaagaggagggagcggaagtgcttctggatgaacaagcggtgcaaaaagaattcgcagacatcaaaggtgaacaaaaggtgcttgaacagcgggtagccgcattagagcgggtatcagaccggcaggatcagcaaatcatgacgctgaatgaaaaactgaacaaaattgacgaaaacacaacatggattaagcggaccattacaggagcgatcgtgacagcaatctgcacgggcgtcattggcggagcaatcgccatcatgtacaatctgctgcaaaagtaagggggaaaccgatatgaaattcgcggacaaaggcacggtcgtcaggacggtgcttcttttgcttgctttattgaatcaaactttgctgatgttcggcaaatcgccgctgaatattcaggaggaccaggtcagccagcttgcagatacgctgtatgccgccgggtcggccgtttttacaatcataacgactgccgccgcctggtttaaaaacaattatgttacagcaaaagggaaaaaacagcaggctttattaaaaataaacaatttatcgaaataggagagatgagaatatggtaaaaatcacacaggattttatcccggcaggaaacaataaccgcccaggctatgcaatgacaccgatttacattacggtgcacaatacagccaataccgcagtcggagctaacgccaaaagtcacgcaagctatgtgaaaaatcccgatacaccgacaagctggcatttcacagtcgatgatacggaaatttatcagcatcttccgctgaacgaaaacggctggcatgccggtgacggaaacggggacggcaaccgtaaatccatcggtattgaaatttgtgaaaacgcagacggcaacttttcacaggccgtggcaaacgcccaatggctcatccgcacattaatgacgtcgcacggcatcccgcttgcgaatgtcgttgcgcacaagcattggtcaggaaagctttgtccgagaagactgctggatacatgggatgagtttaaagcgggaatcggttctgaggaaagacagacgtataccgtccaaaaaggagatacactgtcggcgatcgcgcggaaattcggcgtcagcgtggccgatctgcagaaatggaataacatcgctgacccgaacttgattaaagtcggacaagtgctgatcgtcagcccgccggttgaagcactgtattctcttccggacgaggtgatcaagctgacagagccgtacacgtccggtgaaaaggtataccaggtgcagaacgcgctcgccgcgctttatttctatcctgaaaaaggagctgtcaataacggcattgacggtatctacggtccgaaaacggcagatgccgtggcccgcttccaatctgtaaacggactgacgtctgacggcgtctacggtcccgctgtaaaagcgaaaattctgatgcagctttaacaaaaaaagctgagtcccgttcacattgcgggattcagccttttttcttttttaaccggttcaataacccgagattcctcgcccgcatcctcagcgaataagcggaaagcccgaagcgtccgtaatccacaaactttacgcgtctgacaattttcttcacatcatcacctgtcgcatctctttgttggttttattatatgaaagatatggaaaaaaggaataaggacaagagccgtgtctcctgtccttagtgtaatcaagcttttttttgtttatacttgtcaatcagccgctcgttttctttgaaaattctggcggtatgagggctgacctggtaacttgcgatacttgtcattgaacgttttttaaacattttgaacggtttcgctctttgttccggctgcccgttttgaaatgcctgctccatttaaccgtcaccttcctcttctattggcagcattaaatcataaatgctcgttagcgatgtgaaaagcaaataatcgaattccgtcaacaggttttccgacgtgagtttgatcacgtaatggcggtcctggactgtaaacggaataagcacaagcctgcctttttgatcatagtagacgtctttacggttaagacgggactgaacgtccgccgcatcaggcatatgctccgtcaagcggtccttatccgattgtgcggaatagtcgcacaaggaagccgtgacattcattttttctccataagcggccagcagtctgctgatgccttccgcataagcttctgtacttccataatatacatggatcggttcatttttcaacagatattgataggttttcagtttttcaagataggagtgaagcatttcgttattttcttctaaaatttcccgcgtatccgtctctaattcattgccggcgagctttttgatatacgcgctcaaaaagataaacgcatcaataagggcaaagcagacggcaacaatcaaatattgtctccatgcggcaaagagcgattcgggatcatatgtccaatagaccatggcgcctactacaaatagtaaataccacgttttacggatggcaaacattttttcttttacctttgcttcataccgccaggatgcgtacacatataaaatgagtgcggccgccatcgtccacaccatgatctgaaaaaacaaaagcatgagcatccctcacaattcgaaaaatggtctgctatgttcattctatgtcatgacatcattttcctgtcacaaaaaaaaccgcttctgtaaagaagcggatgtcatcagaaaaagagatctaagatgaaaaaggcgatggcgccgagtgtacctgcaatcggcagggtgatgacccatgtaataagcatccgtttagccgttccccagtttacgccttttacgcggtgggaagcgcccacaccgagaatggaagacgaaatgacgtgcgtcgtgctgacagggagatgaataaacgtggccccgaaaataatggctgcgccggttaagtcggcagatacgccgtttaccggacggattttcataatttttccgccgacggttttaatgattttccagccgccgatggatgtgccgagacccattgccagggcgcaagagagctgcacccaaaaaggaatggcatcacttttatgtaaattggccgtcataagcgccatcgtaatgatacccatcgctttttgcgcgtcgtttgttccgtgtgtataggattgaatggcagccgtcaaaatctgcactctgcggaagcgtttatttgttttcgccagattgctgtctttaaaaatcagcttcacgatcgaatatacgataaagccgagaacaaaggcgataatcggcgataaaataagtgcttcgataatcttaatgaaccctttataattaagcgtcgcaaaacctgacgctgcaatggccgctccggcgatcgctccgataatcgcatgtgaagagctgctcggaatgccgaaataccatgtgatcaagttccaggcgattgcggcgagtagagccgccagaatgacaactgacccgttgtctaatgtataaggattcacaatgtccttcgtaatggttttcgccacaccggtaaatgtcatcgctccgagaaagttcatgatggcggccatgacgattgcgtgccgcggcttcagcgcttttgtcgaaactgaggtggcgattgcgtttgcggtatcgtgaaatccgttaatgaagtcaaataccaaagcgcatatgacaattaatatcgttaaaagtaatagagtatccattataacccctcgttacgcgtttttcataataatggtttcaaggttattggcaacgctttggcaagagtcggcaatttcctcaagcgtttcgtaaatctcgcggtactgaatcactttaatcggatcggtttctgtgccgaacagattttttaatgatttacggtgcaggttatcacagctgtgctcgtattccttaattttaatggcgtgagggtgaatgtccttcaatcggttttctgcaagcagctcaatcgtgattaaaatttccttcgcgcactctctgatgtatccgctgaacttatcgatatgctcatctgaagaagtgatcgagaaaatctccatcattgctgaaaaatgttcgattccgtcaagcacgtcatcgaggctgtttgtcagctcaaggatgtcttcacgttcaatgggagtgataaaagctttgttcagctctttaatcatgacatgaacatgattatctccttttgtttcaaactcttttaacgtatcggcaaattcctttaaagtcgtctggttcgtcactttaaagttgacaaagtattctgcggtttcgtctatgttttttgcgatttctgttaaaaggagtgagaacttatctttttttctttttatcattaaaaaccctccattgtttgaatgagacaatgcacacatcaaattattatatagccttttgtcgaaaaaaaacagataaagtcgaaaaaaacgcctcttgattttttcgtaaaaacgtgtctcatcctgtttttcttatgttacccacttcgccaaaaaaacgtaacatacttcgaattcagacatcttgcttaaaaagtataacaaaagatgtgaatttgctgtcaacttttgcacgtgattttgccagaaaaaaaacggctcccgtaaaaggaaccgtttttgtcagttttttctgccgtttttcagccaaaaataaagcggcagcccggcgaggccgatcaagagggacagcgcgcagctcagtgtatctgtaatgatcgtgctgatcagcacaaacagtgaacccgcgatggccaaaacaggaatgatcggatacaaaggcacgctgtaggcgcgcggttttccgccgcttttttttctgaggataaacacggcgaaaaaagccatgacgtaaaaaatataaatcatgaaaatagagatctcagacagcttatcgggattgctggcgatcatgaaaataatggccagcgcgatctgaaatgacacggcaatccacggggtgcggaatgtcggatgcacccgcgaaatctgtccggcaaacggcagctgtttccgttccgccatcgcaaacgagacacgcggaaaagcgagaatctttccgtttaaacagccgaagatgctgacgatgattccgacgctgatcaattttcccccgatgtcgccaaacagcattccggcagcggtgccggtcgcattttcaccgagtttgacgatgtcggtcgcaggaagaatgtgcagcagcgcaaagttaatgaaaagataaatggcggtgacgaccaagagtccgcccgtcatcgctcttgggagcagcttttccggatttttcatttcgccgccgagtgccgcaagcagaatccatccgtcataagcaaacaaggtggccagtatggcggcgccgaaattcatttccgacatgctgcttgtgacggctgtgaaaatatgctgatcgcctttccaaaggccgaacacgatcatgcagataatcggaatcaatttgccgacagtcgtaattccctgtacgatgccgccatatttcgttccgataatgttaatgatgcttaaaaataaaacggctgaaatcccgattaatttagaccagccggaatcccaattgaacaagtgcgccatcaaagagccgaaatacaagccgattgctccgataatggcggggccgtaaatgataatttgaacccatccgcacaaaaagccccaaaattcgccgtacacttcttccagatatgtataaagtccgcccgttttcggaatctgagtgccgatttccgcaacggtcaagccgccggcaagcgtcaaaatgcctcctaacagccacgcgataagcgcggttttcgcatcaccggagtaggcaagcacggcgcctggtttcataaatacgccggaaccgatgatggtgccgataacaagtgagagggcgatggtaaggccgatctcttttttaagtccattctcttcaatctgcatatcctttccctccagatgtaaaatcgttatgctgaaaaaactattttccatattgtaaaccctaattgctgaaacacgaataaaataaattttctgattttggtgttttgcctaaaagataaaggtttatgcttttgagaaggaaaaaatactgttttaaaagcgaacattaatggttttttaatatcaaaagttcgttattttgagagcggcagtctgcagaccgtctgtgaagcagatgggttgactttacgatccggataacataaattgtatatataaaatatctcgaaatcgagataattgactggaggataacataatgaaagttaatggaatacaccatgtatcagcattgacggctgatgcgcagaaaaatttagatttttatcgaaatatcctggggctgaagcttgtgaaaaaatcggtaaaccaggatgaaccgacgatgtatcacttattttacggtgatgaatcagccaatccgggatcggaattgacgtttttcgagattccgcggatcgcgccgttccatgcggggacaaacagtatttcttcaatcggcctgcgtgttccggatgcacaagcgcttcaatattggaaaaaacgatttgaagagcatcaggtctctcacggtgagatcgtgaaaatagcgggcagggacacactcgcttttcaggatcatgaaggacagcggcttgtgctgacagctgacgaaaaaggaaaagacatcggtgaagcggtgaagcaaagcggcataccggaagaatattctttccgcggtcttgggcccgttgaattgaccgtcccgtatgcagaaccgacgctgcgtgtgttaaccgatgtgctgggcttcactgaaatcgggaaagaaacacatgaagaccggggcgcggttacggtgctcgaatccggaaacggtggcgcgcgtacagaagtccatctcattgaaagaaacgatcttccgcgcgagcgtcctggaaaaggcagcgtgcaccatgtggccttccgtgttcagaatgaggaggagcttgctttatggcaccgcatcattacgaaagaaggtttcagcaactcaggcattgtagagcgttattatttcaaagcgctgtacttccgggaaccgaacggaattctgtttgaattgtcaacggacggtccgggatttatggttgatgaaaaacctgaagagctaggcaaaacggttgcgctcccgccttatctcgaacaccgccgttctgaaatagaagcgcggctgaaaccgattcagtaaatcagaagtaatgaaagatgccttccggcttgacgggggcatctttttttttgcttttttacccgttttgtcattctttttacctatttgtaaacggcaaaataaatgtctttgtttattaataaatttttcacatttggttgttacacttgttcaaagttaaacaaaaggagtgaaaacacaggtgaaaatgaaaaaacgcgagatagacgcagtcttaatccttattttactcgcttccgcattcttgaatatgtacaacatctggaatgacgatacggtgaatccttattacaccgcagcggtaacgagtatgcttcaaagctttcataatttcttttacgcttcatttgacgcagccggatttatcacggtagataaaccgcctgttacataccagattcaaacgatcagcgcgctgatattcggtatgcacgggtggagtgtcatcctgcctcaggcattggcgggggtaggttcagttctattcatgtacttattaataaagccgacgttcggaaaaacggcggcgcgcatcgcttcgtttgtcatggcgtgtacaccgattgctgtagccgtagcgcgcacaaacaatgtcgatgctttactggtctttttcctcttgttcgccacatggcttctctttaaagcgattcgaaaaggaaaactgatctggcttttggcggcattttttgtcgtcggagtaggctttaacacaaaaatgcttcaggcttatatgatcttaccggccttcttgctgttctatatgatggcggcaaataccgcgattaagaaaaaaatcatttcactggtaagcgcgctggccgtattagcagccgtttcattgtcatggccgctcattgttgacaatattcctgccggcaaaaggccatatgtcggaagcagccagacaaactccgtattggaattggctttcggatataacgggattcagcggctgacggggcaaagttccggcggcggccagggcgggcccgacggaaacgcatcgaaagggatgtcttcttccggcggttcttcacaaatgcaaaaaccggccggccagtcagcaagcggagacaaatcacaaaccggcagtatgacggcacctccatctaacggacaaatgccaagcggcggtcaaggaggccctccaagcggcggagacggcggcaaaggcggtcctggcggaggaaaaagcggtacaggcaccggctcgaaaatgcagtcagggtcaggaatgttcggtacgggaacacccggtccgctgagactcttccaacaagaattatctgatcagatcagctggctcctgccgtttgcgatttttggattggccggtttattgatcgccggggcgagagaaagaagaagattatcagcagaacagaaggaaacgatcttttgggcagcgtggcttgtgccgattgccggattcttcagtgtggcggaatttttccaccattattatctcattatgctggcgcctccgattgctgctcttaccggtgcgggatgggtcgccctcgttcatctgtaccgcaagcaggcgggatggaaaacttggctattgccggccgctattcttgtgactaccggatttgagctgtttatccttaaaaactacaatgatcaaatcggcgcaggctggagcatcggagcaggcgttctcggtgcagtggcggcaatcgccctgttcgtattcaaacagcgccaaaaaccgctcagttactatgtttcacttgcagcccttctcgtcttgatggtgatgccgatttattgggcgagcacaccgcttctgtacggaggcaacagctcattgcctgaaacaggccctcagcttgcgtcagcaggcggaaaaggcatgggaatggataacgcatctgtcaatacaaaactgatcaactatttagagaaacataacgccggagcggattatctatttgctgcaaccgattccaacacagcggcgccttacattataaaaacgaaaaaagcggtcatggcgatcggcggattcagcgggtctgacccggccattacgctgactcaatttaaaaagctcgtaaaagaagggaaagtaaaatacttcttaacatccggaatgggcaaaggcggaaacaacgatattgttgaatgggttgagaaaaccggaaagaaagtatcttcatacaaatggcaatcaagcacagatcagaaaacgaaaaatcatgatgcagctgatacaaaaagcagcaaggccgcgggtaaaaacagccgaatgagcggcgggccgggcggaatgaatcagtcagcttcactatacgaacttcaatctgatgaataggaggaaaaaacatgagcagacatattcaatattcaatagtcgtcccggtttataacgaggaactcgtcattcagacaacctatcagcgcctgaaagaagtcatggatcaaacaaaagagcattatgaattgatctttgtcaatgatgggagcaaagaccgcagtattgagattttaagagagcaaagtctgattgatccgagagtgaaaattattgatttttccagaaacttcggacatcagatcgcgatcacagcgggtatggattatgcagaggggaatgcaatcgccgtcattgacgccgatttgcaggaccctcctgaattaatccttgatatgattgagcagtggaaagaaggctacgatgtggtgtacgccgtcagaacgaaacgaaagggagaaacctttttcaagaaacagacggcttctctgttttaccggctgctgcggagcgtgactgatattgatattccgctcgacaccggggatttccgcctgctggacagaaaagtctgtgatgagatgaaaagattaaaagaaaaaaatccttttgtcagaggactcgtcagctgggtcggctttaagcagactgctgtagaatatgaacgagatgagcggcttgcgggggaaacgaaatacccgcttaaaaaaatgctgaagctttccatggacgggatcacaacgttctctcataaaccgctcaaggcggcaagctatgcgggaatgctcatgtccggagcgggttttctctatatgtttatcgttttatacatgaagctttttacagacagcaccattacgggctggtcctctctgattgtgatacagctgttattcagcggcatcgttctattaatgctcggaatgatcggcgaatatatcggaagaatttatgacgaagcaaaagatcgtccgctctatatcgtgcaaaaagcgtacggtatgaaaaacgaaaagatttatcgggaccagcatatgtcttaacaaacaccctgtccggccagcggacagggtgcttttatgtaaaataaaagccgcgggatgacagaatgtcccgcggctttttttattcatctgcggccggtctgggtgtgcagagagcgcatgatcagtccggttcacgaaaaatttcagtaaaatgcttgcaccaagcgtcattccccaagcagcgttttgctgaggaagctgaatgctcagctgcagcaagatcaggccggtaacgaccagcaaaagtccggtttgtttcatgtgtatgtatcctcctttgtacactgagtcatacggctgatccaggcctaaagtttcatctgtatataaaaaatccaaggcggctgccttggatttttgttaagaagatgtttcttctttttgagtcagtttcatttttttcgtcatttccttgccatttctgataattttcacgtcaacggtgctgccgactttcgtatttttgtagagaatattgcgaagttcgctgcccgtgtcagtttctttcccttttaagctgataatgatgtcttctgcttttaatccggctttggctgcaggtgatccctgcgccacttcacgaatataaacgcctttattcagctgtttgccgaagaggccgagtgtgccttcctgatagttttgcggcacttgttccaagtcgatcatgctcacgccgatataagggcgctccacctgtcctttcgtgagaagctcttcggcaatcggttttacatcgttgctcggaatcgcaaagccgatgccttctacatcattttcactgattttcatgctgttgatgccgatgattttgccttctgtattcaagagcggtccgccgctgtttccgggattgatggcggcatcggtttggatgacgttgatgcttgactcaccggctgacgtagagatcgagacggttctgtttaagccgctcacgatgccctgtgtgacggtgcgggaaaggtcttttccgagcggatcaccgatggcgatgacggattcacccgttctgagagcggatgaactgccgaagcttgccgtttttgttacgtgtttatcactgatttctaatacggccaagtccgtcagcgaatcacggccgacgagtttagctgttacatcggtgccgtcatataatgacactttaagggaagaggcgccttcgaccacgtggttattcgtaatgatatacgctttgccgtttgctttcttaaaaataacgcctgaacccgatcccgtttccgcatcatcacccgatgcattagagtttgaatccgagcttgatccgaatccgaataaatcggaactgctttgctgcttctgcagattggtgattccgacgatcgccggtgaaatgtcttccaccatattcgaaatgctgcttgaatttgccgatgagctgtttgccgatttgccgctgtctgattcaaaagatgtctgcttggcggttaccgatgacgtttcctgagcgggagccggattggaagtatcttgagtctgatggtctccaagcggcgtaaatgtatagatgccgagggcgagccctccgccgatcactccgccgagaagcggtctgaaccagccgaagcttcgttttttcttgtcctcgtccggctcggaatatccggccggctgcgggttttcttttactaaaaggacttcctgttctttttggtctgtccgattttcatcacgatagttatccatcatgttcactccgtttctctatttcatcatagcatgatttgcctattattactgactccatcttaaacaaaaagtgtgggataataatgaaaagattgtgggaaattgtgaaaaagacgaaatcggacggcggcgctttatattgacaatttccatcggatttgaaataataaatgggatattatgttcaatccttcacatgaaaagatataaaaaattctgtcaagctaatgggggaaatctgttagctttttcactttgtcaaatagttaagaaaggagctgtcaaatgaaagaaaaacatcactggatcatttctctgcttgctgtgctggctgtcgggccggggctgatgtcgaataccgctctttcggctgtccaaagccttgtccggcagacggtcggcggggaaaactttgactcttttcatccgattattatcggtaatatggcatttgccttattcgtgccggcggggccgtatttaagaaaaagattcggctcccggcctgtctatatgatttcgatggccgcgggtgtcatcggagcgctgcttgctgctgtgacaaatgatatttatccgctcgccgcgggccgttttttacagggagctgcggcgggcactatgctgatgattatgattccgatgctggtgctttcgtttccgattgaacgccggaattacgccttatttgtgttaatcggcggattttacgggtccgtcattatggggaccgttttaggcacggcggcggcaagcgccggccattggcattggctgttcggcatttttggcctgctgtcttttttcggcctcattttcagttatatgtggctgcgggatgacgctcataaaaatactgaaaaatctccatttgacggcatcggttttctgttagcgggtggatcagccgtgctgaccgcctatacttttattcatctgccgaaatggggcttttcatcatggcagacattggcgggatttggaggaagcatcgtcattctgctgatcctgctgattatgcagtacagaaacgaacatgcgctgatttcgattaaacttatgctgattccaaagccgattttgggtgttttcatgatcgctgcgggcagtatttccatagcggtcagtctttctgcatttcacggggagcttcagaccgcatatcacatgtcacaaactcaactgatattcttatatgcgagccttttgggaggcgtggccatcgccgctgttatcagtgcattagcatatgataaagtcggtccgggcatgctcggcataacaggctctgttatactggtgttcgtgaatttccaatggatgacggcgggtcatcatataccgtttattctatttgcggcgcttttcgtgatgctggcggccgggacagggcttatcgtagcagccggactgatgggcgccgcgttgggcggaccgcttccggaactggtgaaacgcatgacggccgttcagtttttaaggctgttcatttatatgggcgcacctgttttaatagggtattttacgaaaagagatgcttccggcatgcttcggggcgcgcgcggcacacaatcgccgcatgacctgctgatggggacatacagcgatttgtttcttattgctttcatcttaagcttgcttttagtgtgtttatcatttgtcatgaatgcgaccggcatgggacataagctggcgcataaaccgcatgccgtccgtaagcaggcggatgaaaagccttcgccgcaggctcctggaccgatcaggcatcaggtcattcccgatcgcgaatacagaagtgcggtcagacagtttcggggtcaccctataaacaaaaacggtatgtaactttttctatcagcaaacccttttcccggtgaaaagggtttgttttttcccataatggcagaatggtatattgcatgtttcatccttttttaatataatttgttagaatattcataatttaatatcgaaattttaaataaaaaaggaggcattacatgaaactgtatctatctgtggatatggaagggatttccggactgcctgatgaaacatttgtcaattccagcatgcacaattatgagcgcggcagggttctgatgaccgaagaagcaaactggtgcatcgcagaagcgtttaataacggatgcacggaagtgaccgtgaatgacagccactcaaagatgaataatctgctcgcggaaaaacttcaccctgaggcagagctgattacgggggatgtcaagccgttttccatgatgcaggggcttgatgaatcgtattcaggtgtgatgtttatcggctatcatgcgagagcgtcgatgccgggcgtcatgtcgcacagcatgatattcggcgtccgccacttttacataaatgataagcctgtcggtgaactggggttaaatgcctatctcgccggattttacgatgtcccggtcatcatggctgccggagatgattgcgccgcaaaagaggcggaggagctgatcccgaatgtgacgactgccgccgtcaaacaaaccatttcaagaaccgcggtcaaatgcctgtcccctcaaaaagccggacggctcctgacggaaaaaacagcctatgcgctcaaaaataaagataaggtcaaaccgctgactccgcctgaaaaacctgtattaggcattgaatttgccaattacggacaggctgaatgggcccatttaatgccgggcacagaaatcatcccgggaacgacaatcgttcaatttcaggcaaaagacatgccggaagcctatcaggccatgctcgtcatgacagaactcgctatgagaacaacattctgttaaaggggtgaacggcattgctgcggtattttatcaaacgttttatcgccatgattatgaccgtcctcgtcatcaccactctgacatttgtcatgatgaaagtgatacccggctcgccttttaacgaagagcggggcacaaacgaagcggtccagcgaaatcttgaatcctactaccatctgaacgaacctcttatcactcaatacgccatctatctaaaatccattcttacctttgatttcggtccttcaatcaaaaaaccgtcagacagtgtaaacgccatgcttgaacgcggatttcccgtctccttcgagcttgggataacggcgatcatcatcgctgtgatttccggactcgcgctcggcataacggccgctctcaggcgcggcggctttctcgattatgcggccatgagccttgcggtgctcgggatttccattccgaattttataatggctacgctgctgattcagcaatttgcggttcatctgaaatggtttccggcagctacctggacgagtcccgttcacatggttctgccgactgttgcgcttgccgtcggtcccatggccattatcgcgcggctgacaagatcaagcatggccgaagtgctgactcaggattacatccgcacggcaaaagcaaaggggctttctcccgtcaaaattgtgatcaaacacgcattgaaaaacgcacttatgcctgttgtgacagtactcgggacgcttgccgcaagtattttaacgggcagtttcgtcatcgagaaaatttttgccataccgggaatgggcaaatatttcgtagaaagcatcaatcagcgcgattacccggtcatcatgggaacgaccgtattttacagtgtgattctgatcgtcctgctgtttctggttgatttggcatacggcctgttagacccgcgcataaaacttcataagaaagggtgatcctgatgaatctcccgcaagaaacggtaaaacacacagaagtgcctgatgactggtttcagccgggcgcggaaagaaagggtgaaaccgagtcggtcaagcgtccgagcctgtcttacagtcaggatgcgtggcggcggcttaaaaagaacaaattggcgatggccggacttgtgatattatgctgcctgtttctatcggctgtgttcggcccgctgatatcaccgcacagcgtgacaaggcagacgctcgccgagcagaatcttccgccttctttttcacactggttcggaaccgatgaacttggccgggacgtgtttacaagaacgtggtacggagcgaggatctctttatttgtcggtgtgatggcggcgctgatcgactttttgatcggcgttatctacggaggcgtcgcgggctacaaagggggccggacagacagcgccatgatgagaatcatcgaggttctctacggtttgccttatctgctcgttgtcattttgttaatggtgctgatggggccggggctcagttccattatcgtcgctctgacagtgacgggatgggtcggcatggcgcggattgtgagagggcaggtgctgaggatgaagcatgatgaacacgtattggcatcgaaaacgtttggagcgaaaacatttcggatcattaagaaaaatctgctgccgaatacgatgggagccattattgtccaaatgacgctgacggtgccggcggcgatttttgcggaatcatttttaagttttctcggactcggcattcaggcgccgtttgcaagctggggagtcatggcaaatgacgggctgccggcgattttatcaggccattggtggcggctgttttttcccgcttttttcatttccttaacgatgtacgcgtttaacgtgcttggagacggcttgcaggacgcgttagacccgaaactgaggaggtaggaaaaatggcgcagcaagttctttccgttcaaaatctgcatgttactttttcaacatacggaggcactgtaaaagccgtaagaggcgtcagcttcgatttatataaaggtgaaacgtttgcgatcgtcggtgaatcgggatgcggaaaaagcgtgacgtcacaagccgtgatgggtcttcttccgaaacattcggcaaagattgaatccggaagcatacaatttaaacagaaagacctttgccgaatgtcggatcgggaaatgcggggaatccgggggagcgatatttctatgatttttcaggacccgatgacggcgctcaatccgactttgaccataggggatcagctctcagaagcgctgttggaacaccgcgccatgacaagaaaacaagctgaatccgaggttctcgccatgctggatctggtcggtatcccggactcgaaatcccgcctgaagcagtacccccaccaattaagcgggggcatgcggcagcggatcgtgatcgcgatggctctgatctgcgagccggaaattatgatcgccgatgaaccgacaacggctcttgatgtgacaattcaagcacaaatccttgaattatttaagaagattcaaagaaaaacaggcgtgtctattattctgatcacccacgatctcggcgtcgtcgctcagaccgccgacagagtcgccgttatgtatgcggggaaaatcgccgaaatcggcacgaggcatgatattttttaccgtccggctcatccatacacaaaggggctgcttcgttcagtgccgcggctggatatggaagatagtgagctttcgccgattgacgggacgccgcctgatttattcgatccgccgccgggctgcccgtttgccgcccgctgcccggacaggatgatcgtctgtgaaaaggtatacccggcaacaaccgtgaaatccaaaagccgtatcgtcagctgctggcttcaggatcaccgtgcagagcggctgaagcagcagctgactgcagcagaggaaaaagggggattgaaatgaaaaagagatgggcgattggtgtgattgctgttgtttcgtttgctctgatgggctgtacagccaatgaacaggcggggacagaacccggcaaagcaaaagaacaggggggagagacggtgctgcggctcaataacgaaaatgagccgacctcacttgatccgccgatcggatttaataatgtttcctggcagccgctgaataacatcatggaaggattgacgaggctcggaaaagataataagcccgaaccggccatggcggaaagctggaaggtgtccgctgataagctgacatataccttcaatatccgagataacgccgaatggacaaatggcgatcccgtcacggcggaagacttcgtgtacgcctggaagcggatgctcgatccgaaaacgggcgcatcttccgcttttctcggctatatgatcaaaggcggagaagaatttaacagcggaaaaggcaaaaaagaagacgtgaaagtcacggcaaaggataaaaaaacgcttgtcgtcacattggcggccccgcaggattattttttgagcgtcgtgtccaatccggcgtatttcccgattaatgagaaggtcgccaaggctgatgcgaaatggttcactgaagcaaaaacttttgtcggcaacgggccgttcaaactgacggaatggaagcatgacgacagcatgacgatggtcaaaaacgagacgtattgggataaaaagacggtgaaactggataaagtgacatgggcgatggtcagtgaccggaataccgactatcagatgttccagtcgggggatttggataccgcctttgtgccggcagagctgagcgagcagctgatgggaggaaaaaatgtccgcacgtgggatcaggccggactctatttctatcgttttaacgttaaaatggagccgtttcaaaatgaaaagatcagaaaagcgttcgcggcagcgattgatcagaaagaaatcacggattatgtgaccaaaaacagtgaaaagccggcacatgcctttgtatccccgggatttactcagcctgacgggaaagatttccgcgaagcgggcggcagtttactaactccggatgaatcagaagccaaaaaactgctggaaaaaggcatggcagaagagcattatgacaagctgcccgccgttacattgacatacagcacaaaaccggagcataagaaaatagcggaagcgattcagcagaagctcaaaagtgtgctcggtatagacgttaagctcgccaatatggaatggaacgtctttttagaagagcagaaaggactgaagttccagttctctcaaagctcatttttaccggattacgcagatccgatcagttttcttgaggctttccaaacggataattccatgaaccgcaccggctggggaagcgcggcatacgacggctgcatcaagcaggcaaaacaggaagccgatgccaaaaaacgttttgcgctcatgcataaagcggaaaagctgctcatgaacgaggctccgatcattccgatttacttttacaatcaggtgcatctgcagaacagcggcgtgaagggcattgtccggcaccccgtcggttacattgatctgaaatgggcggaaaagtcctgatcttacagcggaaacatatgccgctcttttgccgttaaaggagcggcgtgtttcacttttcaatccggaaaggagattgaaaaagtcatgaaccataaaccgaaagcactgcaaaaaggcgacacggtcggtgtgattgcacccgcaagcccgcctgagagcgggacgctgcaaaccgcgctgctgtttttagagaatgagcttggccttcaagtgaaactcggccgggcgctgaagacccgtcacggctatttggcgggagaagaccgggcgcgcctcaatgatctccatgacatgtttagtgatcagaatgtcaaagcggtgatatgcgcgtgcggaggattcggcacgggccgcattgccgccgacatcgatttcggcttaatccgccgcaatccgaaaattttctggggatacagcgatattacgtttttacataccgccattcatcaaaatacggggctcgtcacatttcacggcccgatgctgagcacggatgtcgggcttgaagatgctgaacccctgacaaaagcgtcgtatcatcagctttttacagaaacggaattcacctatacggaggacatttctccgctggaggtgctgacaggcggaagggccgagggagagcttgcgggcggcaatctgtcgctcattacgtccacactcggcacgccgtttgaaattgatacgaaagacaaattgctgtttatcgaggatattgatgaggagccgtatcaaatcgacaggatgctgaatcaattaaagatggccggaaaactgtcagacgcagccggaatactggtctgtgattttcaccaatgcgaaccgaagcataaagaaaagtcgcttactttagagcaagtgctgaacgattacattgtcaaatcagggaagcccgcgctcaaaggctttaaaatcggccattgttcaccgagcttcgccgttccgatcggagcccgcgcggttatggatacggcggccaaagcggtaacgattgaatcgggggtttccggaagggagtgatcaggcgtgaggattacagatattcaaacgggacggatgtccgtgccgctgaaaaagccgtttaagaccgctttgcgcacggtttacaatgctgaatcggtcattgtgaagctcacatttgacaacggtctgaccggctggggcgaggcgccgccgacggttgtcattacaggcgacagcacggacggtattgaaagcgccgtccgcgatgtgctgaagcccgctctcttggggcggagcctttccggcatagaagctgttttgtatgatatcagccggctgttggaaagaaatcaaagcgcaaaagccgcggtggatatggctgtatatgacggatgggcgcaaatgcacggacagccgctttaccggcttctcggaggctatcggaatacactggaaacagattttaccgtcagcgtcaattctcctgaggagatggcgggggatgcagaccgctatgtgaacaaaggatttcatattttaaagataaaagtcggcataggtgacatatcggacgatgttgcccggattcaggcgatcagatcacgtgtcggcggaaacgtcaaactgagattggacgccaaccaaggctggacgccgaaagaagccgtgactgcgatccgaaagatggaagacgccggcctcggcattgagctggtcgagcagcctgttcataaagacgatatcgccgggctgaagcaggtcaccgatgccgtagacacgccgattatggcggatgagagcgtctttactccccgtcaggccttttgcgtgctgcagacgagaagcgccgatttaatcaatattaagctgatgaaagcgggcggcataaagcaggcggaaacaatcaatgcgatggccgaaacgtgcggcgtggaatgcatggtcggcagcatgattgagaccaagctcggcatcaccgccgcggctcattttgccgcgggcaaacggaatgtgacaaggtttgattttgatgcgccgcttatgctgaaagatgatttgattaaaggcggcatcacatacagcggcagtcagattacgattcccgatgaaccgggtctcggcattaccggggtgtcgaaacaagaggaggcgaaaagatgagagcagccgttacagcggcggcagccaacgtatggacgatgccgtcatctccccgttcgtatgatgcgccgatgcttgaaaacccgccgcagatcagaaaatggttagcgtctatgggatatgaagagcggctgcaattatgcacagacaaccttgtccaaacgcaagcgcttttcggggaagaggtgatcattctcaaagaggaaggggaatgggcttttgtcgccgttcccggccagccctcaaacaaggatgcgcgcggatatccgggctggataaaaaaaagccagctttcaaaagacggctttttttcatcttcgcccgccgtatggattaccaaaccgacagcttttttatatcacactaacggcgaaccggacttggaagtaagtttcttaacgcgtcttccggcatcaggacgtgagaaaggcttttttcgggttgtgacgcctctcggagaacggttcgtaaatgaagctgacgcagacgagtgccggcatacggaaggacgggcggccgaggtcatcgaaacgggcatgatgtttctcgggcttccgtacttatggggaggactgagcggtttcgggtttgactgttccgggtttatgtattcgatatttaaagcaaacggctatacccttccccgtgatgcaaaggaccaagcaaaagccgggtgcggcgcggcggtaaacgatatccggccggctgaccttttgtttttcgcctatgaagaaggaaaaggcgcgattcaccatgtcggtttggcgctgggagacggccgaatgctgcactccccgaaaacgggaaaaacaatcgaagtgctgtccttggaaggaacgatctatgaaaaagaattatgcaccgtacgccgctgtataagcgaaaagggggaatagaaaatgacggcatctccgctccttgaagtcagcgggctgaaaatgcattttgacgcaggaagaaagaaagccgtaaaagcagtcgacggtgtcagctttcacattaaaagaggggaaacattcggacttgtcggagaatcgggatgcggtaaatcgacgctcggaagagttattctccgtctgtatgacccgacggccggttcggtatcatatgaagggacggatatacaccgtgccgcggccgaacagcggtcggtcttcttccgcaagctgcagatgattttccaagacccttacgcctcgttaaatccgcgtctgaccgtaagggaaattattatggagccgatggaaatccacaatctttacaatacaagaaaagcccgtatgatgatggcggatgaactgcttgaagctgtcgggctccatccggatttcggcagccggtatccccacgaattcagcggcggacagaggcaaagaatcgggattgccagagcgctctctctgcatcccgaatttatcgtggcggatgagccgatttccgcgctggatgtgtcggtacaggctcaggtcgtcaacctattaaaaaggcttcagaaagagaaagggctgacatttttatttatcgcccacgatttatcaatggtcaagcatatcagcgaccggatcggcgtgatgtatttgggccgcatgatggaaattacagaaagcgctgcgctttaccgggaaccgcttcacccttatacgaaggcgcttttatcctcaatcccgattcctgatccgcttcttgaggacaagcgtgaacggattattctgaaaggggagctgccgagcccccttaacccgccgagcggctgtgtattcaggacgcggtgccctgaagcgatggagctctgcggtaagataacgcctgagcttgaagaagtgaaggcggggcgttttgtcgcctgccatttatacaaaaaagaaagctgacaatataaagtcagctttctttttgattaaatctgatgcagaaatgacacgcagaccggatacggaaccggaatgtcggattgaagcagagtcaatttgcctgtttccggatcacgttcaaacaaaaccagatttcccgtttcttcgtttgacgcgacaaggaatgtctcggaagggtcaaacgcgaaatcacgcggccagttgccttctgtcggcacccattcaataagagacaattcaccggaatattggttgatcttaaagatggcgatgctgtcatgtccgcggttggcggcataaagaaatctgccgtctttagatatgcggattgcgctgccttgcgatttgtccgtaaagccttcaggcaaagcggaaatgacctgcagctctctgaattcacctaaggtcgggttgtattcaagcgcgatgacttcattgctgatttccgtcatgacataggcgtatttttccgccggatggaaaacgatgtggcgcggccctgaacccggtgcgaaagagtgagttttcacctctgtgagcgaaccgtttttcatttggtacgtatacagcgtatccgtccctaaatcgacggctgcaatgtagttatgctcaggtgtatagccagcgaaatgggtatgcggtttctcttgtctttcatgaggacctgttcccgtatgagcggcttcggcagccggctcctgcagacttccgtcctcattgacgggaaaggcgtgcacttttccgctgtggtaattagcggttaacacatattcatgtttatcatcaatgctgacgtggcatggagacgggccttcaatcagctggtggtttacaaacgttaattccccgctgttctgatgaatctgataggctgcgacgccgccttttccgtctgctttttcaatggaatacagcatgctgttatcagaattcggagtgacgtatgtcgggttgccgagctttgctgccagcttcggccggctgagccttttcgcttctgtatcaagttcaaaacaataaatgccttcgcttccgccttttgtatatgttcccgcgtatcctatgtacttagccattcggtttccccctttagagtcttgtcttctctatattaacgtatcttgaaggaaactgccttgtaaatgtttaagatgttctggcaagcggcaaggtgcagcagcggaaggaaccgcctgatttgataatttcggaaaactcggtttcaatgaccgtataacccctttttctgagctcgcggttcgtatgacggtgctgcggcaggctgataattgtctgattgccgattgacaggatattcgggccgagcgtgaattgctcttcttcaggcacttctatcatctcaaaacgttcggcgagaagatcaatttctttctgccgcaagccatttttacagtatagcgcttccgtttccgagatcatattaaatacacagtccaaatgtaagaaatcctccttgagagggatcggcacaacagtcatctccggcagcgcctcccgcagctcccggacagccgctttatccgtacgcttgctcagcccggcgtaaacggtgccgtctgcgatcaagatgtcgccgccttcaatgttcgcttttttcagtcgcgtataagggattttcttatcgtcaagcaggtcttgaaacactttttcttctccctgccggactgaagccgccatgtttgaaataaacgctgtctcgcctaagacaaatccgatatcccgggtgaatacctgctcaggcaaagcgggatcggcaggcagcaggacgacttcaatctgatgagatcttaaaatgtcaataaactcactatgctgtttgagggcaacgggtatgttaatattttcttgtttgaaatgtttctgcgttccgttaataatatccttgatggtcatgtgttccggccggcataagatgactgtctgcaaagcatcaaactcactgcggcaagccggtttccgcgtggatttgggtatggatacgtccatgtgatatcctcctatcggtattcaatgtgcgtttattattcccggatgtgataaataatgaaacatttctgatagaatatctaaccaacttaatatttaaaattttagacaaaacgatcaaagtattgtttaatagggtacagatgaaatgtcaaaacgaccagacaccaaaggggagtttaaataatatgaagttgccagaatcaagattttgcaaagaaacaagggttgtcaagacaagcagggtttttccgcttgatacgaataatcacaatacgctgtttggcggaaagctgatgagctatattgatgatatcgcttcaatttccgcggcccgccactgccggtgtgaaacagtcacggcctcaatggattctgtggattttttgcgcccgatcggccaacaggattccgtatgtcttgaatcctacgtcacatgggtcggcacatcgtctatggaggtgtttgtcaaagtcattaaagaacatctgatgacgggtgaacgcgagcttgcggcaacgtcgtttctgacattcgtcgcgctcgattcaaacgggaaatcggtgcccgttccgcggatcgtgccggaaaccgaggaagaaatcatgcttcacaatacggccgttcagcgcgccggagaacgaaaaaaccgcttaaaacacagcaaggccctggccgaggcgctcggaacagataaaccttggtaatcgtcaaaccgctttttttaaaagcggtttttttatgctgaaaaaggacttttcctgccgggtccataatttattacagggaaaggagacgtggcgtgcatgatgaaacataagtcttccggcaccatcctgacaaccgggcgtatccgtctgcggactatgcgggatgacgatgaagacaatttgtacgggctgtttaccgacagagaggtcatgaaatattatccttctcttaaaagcagacgggaaacgaaggaatggattgcctggaacaaacgattggccgcaggatacggcgtcagtctttggatcgcagaggataaagtgtcgggtgcatttctcggtcaatgcggaatcgttccgcagacgataagcggaaacactttgatggaaatcggctatatgtttgcccgctgccgctggggctgcggctatgcgacagaggcggcgaacgcctgtctggactacggttttcatacgcagcaatacggacgcatagcggcgctgattgatccggaaaatgctgcctccgtccgcgtcgcggaaaaaatcggcatggtgcccggtgagaccgttaccaaatgggagaggcggctgacggtatttgacatcacatctgacgttgaacgtttcggcgaaatgtagtatgatacgaacagacatgttttctagggttccgcatgttcatacatggcctggtccgagagaaaacacatatgcggacatatcccgcatatgcacacggagggaaaaaagcccgggagagtcaatctcatgtgagacgactattccgggctttttgtattgcccggaaacagaaaggatgaagaacatgaaatggggtttagtggtcatagcggccgtatttgaagtggtatgggtcaccggcctgaaacatgctgattcggcactgacgtggggcggcacgattacgggaatcatcatcagtttttatctattaatcaaggcgacggacagcctgcccgtaggaacggtatatgcggtctttaccggactcgggacagcgggcaccgtgctcagtgaaatcctgcttttcaaagaacaggccgatccggtaaaaatcgtgctgatcggcgttttgctgatcggtgtcatcggattaaagctggtcacacaggataagcctgagacgaaggaggagaaggcgtaatgcattggatcagcctgatagccgcgggtctttgtgaaatgctcggggtcattttaatgaatcaatttcaaaaagaaaagaaagtcaagtggatttttttcattatcgtcggatttgcggcttctttttccctgctttcttatgcgatggagacgattgcgatgggcacggcctatgcgatctggaccggtatcggcacggcgggcggcgcactagccggcattcttttctacggcgagcagaaggatgcgaagcgcatctttttcattgcgcttattttgtgcgcagccgtagggctgaaaattctttcgtaaattgatttttatcaaattttcagtataatctataataagttacgaattatgaagatacgagggattaaaacagatgaattcatatatgacacagcggctgaaagaataccgccgcggtaatgaggaaaaagggcgcctgcttgtcagctgccccgatcagccgggaattgtatcggctgtttccgcgtttttgtttgaacacggcgcaaatattattgaatcaaatcaatatacgactgaccctgaaggcggacgtttttttctcaggatcgaattcgactgcaagggcattcgtgagaaaaaagaggatttacagcaggcgttcgcctcaatcgcccagacattcggcatgacatggagcctctctctggcaagtgagctgaagcgagtggcgatctttgtatccaaagagctgcactgccttcatgaactgatttgggaatggcaaagcggcaatatgatggccgaaattgcggtcgtcatcagcaaccatgaagaggcgaaagaagtggtcgagccgctgaatattccattccattacatgaaagctaacaaagatatccgcgccgaagttgagcggcgccagcttgagctgctggagcagtataagattgatgtgatcgttcttgcccgctacatgcagattttgacgtctgattttgtatctgcccatccgaatcggattattaacatccaccattcatttctgccggcctttatcggcgctaatccgtataaacgggcttatgagcgcggagtgaaattaatcggcgcgacctctcactatgtgacggacgatcttgacgaagggccgattattgaacaggatattgaacgcgtcgatcacagagatcacgcagaggatctgaagaatatcggcagaacgattgagcggagcgtgttggcaagagccgtaaaatggcatctggaagaccgtgtcatcgttcacggaaacaaaacgatcgtatttaattaatgacggtccgccggggaggcgggctgttttttatggatgaaaatgtcttgacaagaacctgttttctttgcataatataaaaaaatcattgagcgttgaagaggatcagtacgcagaactttctgtgacagagagcaaaatggcccgctgaaacattttgccgcatgaaacctgccgaacctgccttggagtcctgaggggaaaactcaggcgcgatacctggcgttacaggaaagcgggacgcgtgaaaaacgcgttcaaacaaggtggtaccacggaaagcccatttcgtccttatttttcaggacggaatgggctttttttattgacgagagccggtttggattgattgccacggaggagaaacgatgaaaaaacaaagaattgttgtgaaaatcgggagcagctcgctcaccaacagtaacggaagtattgatgaagcaaaaatcaaggaacatacggaagccatttctttattaaaagaaaacgggcatgaagtgatcctcattacctcaggcgcggtggcagcgggtttttccgctctcggctatccgtcgcgacccgttacgataaaaggaaaacaggcagctgccgcagtcggccagacgcttttaatgcagcaatatatggaccatttaaaaggatacggtctgacgccggcacaaattttattaacaagaaatgatttctcaaaaagagagcggtacagaaatgcctatgccactgtaatggaactgttggagcgcggcgtcgtgccgattattaatgagaatgattccacatcagtcgaagagctgacgttcggtgataacgacatgctgtcggcgcttgtaagcggtttgattcatgcagaccaattaatgattctcacagacattaacgggctgtacgatgccaatccgaatgaaaacccggacgcaaagcggtttgactatctgaatgacatcacacctgaattgctcggatatgccgggtcagcaggctcaaaggtcggcaccggaggcatgaagtcaaaacttctcgccgcccagaccgcattgtcgctcggggtgaaggtgtttatcggaaccggctccggacgtgaaaaactgatggtgattttaaacggaaaaggcgacggcacttatatcggcgataaagacctgtcctcagtgaataatacacggcaatggatcatgtttcattctccgatatcaggggaaatcatcattgatgggggagcggagcaggcgatgatccataacgggtcaagtctcctcccggccggcgtcgccgatgtctgcggcagttttccgaaaggagccgtagtggaagtcagagggcccggcggcattatcggcaaagggcagacacagtactcatccgatgaaattttagaagccaaagggaagcggagcgaccagctttcaggaacgaagcaggtggaagtgattcacagagatgattgggtgaatttatttgacaagggggaacacaaatgagtgaagtattgcaaaaagcggctttggcaaaagaagcggctgccgaaatggtcatgaaaacgacggctgaaaaaaacgaagcgctccaatgtattgcagacggactcagaaatgaacggcagctgattttaacagagaatcagaaagatattgaagcgggacggaacagaggattgacacctgacattattgacaggctgacgcttgatgaaaaacgcctgctcgatatcgcggacgccgtggaactgctaatcggtcttgaagatcccgtcggtgaatcattggagaccattaaaaaagagaatggattatcaattgaaaagatccgcgtgcccctcggagtagtgggcatgatctatgaggccagaccgaacgttaccgtagacgcggccacactctgtctgaaaaccggaaacgcggttgtgctcagaggaagttcttccgccatccacagcaacatagcgcttgtcagtgtgatgaaacgcgcacttgggctgtcaaagcttccgattgatgccgttcagctcatcgaagatacaagcaaagaaaccgccaaacagctctttacattaaatgatgggctggatgtattgatcccgcgcggcggtaaaaatttaattgatcttgtggtcagggaatcaaccgtacccgttttagaaaccggagcgggcaattgccacgtgtacatagatgagtcagcagatccccttatggcaagcgaggtcgtcatcaacgccaaaacacagcgtccttcggtctgcaatgcgattgaatctcttctgattcatgaaaaatgggccgaagaacacggacgaaagctgctgaatcagctgacagaaaaaggggtggagctccgaggagaccaggtgatttgcggactggagcctcaagcgaaacaagcagaagaagccgattggggagcggagtacctggcgcctattctcagtgtaaaaacggtgcaggacgtacaggaggcggtccgccacattcagcagtacggcacaaaccattcagaagccattctgacggagaacgccgagcatgcggcttacttccagaccgccgttgacgccgccgccgtgtatcataatgcttcaacccggtttacggacggttttgaattcggatacggagccgagatcggcatcagcacgcaaaagcttcacgcgagagggccgatgggacttccggcgttaacatctacaaaaatcatcatcaaaggaaacggacaaatccgggtataatcttttaagcttatccttcaaaaagggtaagctttttttatgcggaaagattgacggtttccattatatttcgtaaaattaaattgtacacaatataatagaggtgaatttatatgacaaaaccattatttactgcaaccgtttcagccgcaggcggacgtgaagggaaagtcacgtcttctgacggggtgctgaatcttgatgttgccatgccgggaacgccaagagcaaaaaagctcgaacaagccacaaaccctgaacagctgtttgccgcaggatattcagcctgctttgacagcgctcttcaactcgtagcaagaaaagagcgtctgagtattgaaacagaggtcactgcgcatgtcagtctgctgaaagatgaaagcgaccaaggatataaactcggcgttacccttgaggtcaaagcatccggcattgagaaacaggagcttgaagcccttatccaaaaagcgcacggtgtgtgcccgtattcaaaagcgacagcgggaaatattgaagtgaagcttctggcagcagaataaaaataaggatgcccattcggggcatccttattttttgccgtgcagcgttttcaaaacctcataaagcgactgttttacctgctttaattcctcttttgacagtcccgtctgttccagcatggcaatggggatatctgccgctgtattctgcaaggcccgtccttcatctgtgagcctgatcgtcacggatcgctcgtcttcagccgaccgctttctcatgatgattccgtgctgctccatccgtttcagcatcggtgtcagcgttccggaatccaggtgcaaaagctcacccatccgtttcacattcagttcttcgtgctcccataataaaagcagcgccaaatactggggataagttacgttgagcttatcaagcagcggtttgtaccgtttcgtcatttcccttgagcttgcgtacagcaaaaaacaaagctgattctccagtttcatatgttcaaaatctttttctgccattctttcaccaactcttttttgttaacgttacccctattgtagccgaaaaacggcccatttcctattgcaatcatgtttaaaaatatgagcaggggcaatatatacagtaagtacaatgaggaggctgataataatggcattatttacttcaaaagcgaccgcagtcggcggacgagcaggacatattaaatccgaagacggggtgctggattttgacatcatcatgccgaatgcaaaaaaagacggagaaaccggcacaaaccctgaacagctctttgcggcaggatatgctgcctgcttcgggggagcgcttgaactcgccgcccaaaaacaaaaaatcgacatgacctctgaaattgaaggacaggtcagccttttaaaagatgagagtgacgggggttacaaaatcggcgtaacgctcgtcattgatacaaaagatcttgataaagaaacggcggagaagctggtgcacgccgctcacgagttctgtccgtattcaaaagcaacaagaggaaatgtagacgtcaaacttgaattgaaataaagaaacgaacgaatatcccggatttcatatccgggatattttattaacgaaaacatcagtaatgatctcttctctcccggaataagaatacgatatagcacttttgcataatgacaccaagagaaaagagggagaaatcgatgactcttccaaacataccgaacatcacccccgacattacactctccagatgtgagaccctgaacctccttctttcatccgtggctatggaagaaatcggactatcccatattctgcaggcggaagcggaaaggattcaaatgtttctcagcgcttccggcgatccctccttaggggaattatcatcaatcaatagaagcactgaacggctcctgcgcaccgtcatgaaatcacaactccttttgcagacgaagcttgaagacattatctacttacaggatgctgaagcctgtatagacccggacgatccaagtaatccgagtgatccaggcgatcctgatgacccgtggaatccggacgacccaagtaatccgagtgatcccggtgatcctgatgacccgtggaatccggacgacccaagtaatccgagtgatccgggcgatcctgatgacccgtggaatccggacgatcccagtgatccggaagatccgtgtgacgacctgttttacggccgtattggctgctgtgagtgcggggattgtgaggactgcgattggaagaaaaaaggcggggagcgttcataaaaaaagagacgggtgaagcatatgccgtatccgagcatctcaaaagcgaaacagacatcttttgaagccttgcattgtctcacgatggcgctgttaaatatattatctgtgaccgtggataaaagaaggggttcaaattacaaagaagaaatcaggctgttctccgcattgtgccgctggcagatggaaacgggcggccggctgtttttaatgatcagcttggaagaagaacagaagcagatgtatgcgcggcactttcatgaaatgaagacagtgacggaacgaacgaaaaaattcatttgtgaaagcccgcgcgaattccgggcgcatcccattacgaagcgggctgtcaggcagcttcaggaatgggatgcagaatcaactgccgaacctgccgtcagatgggtgcggcctgtcatcataacgatgaacggcactcctggacggccttggttcaatcaacaactccaaaatcgggaaaggtgagaaaatgagcggaaatgctgaatgtaaactgactctttgcatgattgtgaaaaacgaggagagatatatctcccgttgtttatcaagtgtacaagacatcgctgatgagatcgtcatcgcagacaccggatcacaagataatacaaaagatatatgtaaaagctttcaggcaagagtgtttgatttcgaatgggagaatgatttcgcaaaggccagaaattacgccctgcagcatgccgaaggggattggattttagtgcttgacgcggatgaagagctcgatcaggagacgggccgttttttaacttctctgcttcatgacggattaccgagccggggacttttgaaaatcatcaattatacggggaagcagctcgatgaaaacgaagcgtttgaaagcatgcagccgaggctgttccgcaatcataaaggccttctgtatcaaggcagaattcacgagaatatctcggctcccaatgaggaagaaaacaatgcttttttcacgctcccatgtgtgattcatcactacggctacttggagcaggaagaaaaaatcaaacaaaaacataaacggaatatcagcatattaaatgaagaactttcagaggaaaatcctgatccgtggctagtctatcatctggcaagtgaatgttacagaataaaagactatgaaaaagcattacatcttgtcaacggctcaatatttcaatttttaagtgagaaacgaatgcctccgtctcttctgtattttctaaaatatacaatattgcttgagctcaagcgatatgaagaagccgaacaagggattgaaaaagtgctcaagctttatcctgattacagcaatcttcattattataaaggccttgtattatatcatttggaaaagtacagagcggcaatcaaagcatttgaagccggaacgcaggttgaaggagaaaacgctgatcacttcattttaaaaggtgccgccgatttcagagctttttattatatggcgaaatgccatgctgcattaaaccatgatatgacggccatcgcttacgccaaaaaatccgtgaaattcaatccgcaatttaaacccgcgcaagaacttctgtctcaattaaaaaaggatcagcggacaaacgcctgatcctttttttgcatgttccattaagataatcgaataatgtttaaagctgcgccggcacttcctctaagcaatgtggccgcacccaataatccgaacagctggagctgaatggtgctgcctgctgtcaaagtcacaataaaggagttattgaagtttgccaaagacgcgaccggagcaataatcgaacttgcagccggagtgccgttgattaagatgcgcgaacttactagcaggccggccgttaaattaatatggtaggaaatatagtaccgtcctgccggagcaacggtgaatacagtatttgcggcattagcggtaatatccgctgagaggttttgttcattcggtaaggaaatggccgtgccgccgttaataactgcgacaacaccgccgcccgtattgctcgcatagccggaagtggctgtcagacttgttccggtgcttcccggaggccctgtaatgccggtagccccggtaactccggtcggtcctgtaacgccggtaattccagttgatccagtgccgccagtagccccggtaattccggtccgcccggttgaaccagtagcgccggtgcttcccgccgcagctaaaagtgtatagtcagctgaggtttcaggggttcccgacgggctgtttacgtttgcgacataagagctgccgttatacaagacaacctgtccggtcgtgtaagtaggggcgatcagcggattaaaagcaacaatcccttgaagacccgcacccgtggccccgtcggccccgtggcccccgtcggtcccgccaatgtagggatatttgagatactgtccaattttgaaccgagaaggagctcctgtttcattaagctgtcaagcgtatcccggacgctctcattcaggttaagaatatccgcaagacttgacgggggtcctgttaatccgggaatcgttccgagcgcgtattggattttttccccttccgcattcagaatatgtgccattcccagctcttccatagcaattgacgaaagaagaaggttaatggtatcgtctctggaaagtgtaacgacaggggtgatattgggcatattaggctgtgacacaatgtccctccttatgagttggctgaaaatcattttattgcgaacaaagttcccccaaatgagcgtaagcagtactgtatcattatattcactgattctgtccaagtttctgaacgaattcccttcattaatttcatcatatatgaaggaaatactttaaatatagagaaaatacatcgcacagcattcacaaaatcggtcaaaatgacagcgggacatgtgatcgtctataaagcgatggctatatatcttgtgcgtttcctgcaaaaacgctctttttcatttcaagttttctgtataaaagggcgagaagcatggacggtatcgtacaaacaatcattccgataaaggcataccggggttcaatttcatataaaaaacctccgaaaatagtaaataccgcagtgctccagctgagagcaagcgctgaatatataccttgggctttcgggatttgcgcgggtgaaatatttttaattaagtatttcataaatgcatagtgtcccatcgcgaatgaacaggcatgcagcgtctgcgcaagacagaaaatgatgacatgcggaaaggcaaatacgagtatccagcgtacggtagcaccaagcgccgccagggcgagcaaagagcctgccgtaaattgatgaaagtatcggtcagcgattgcaaagaagataatctccgtgataacggcgatgttgatgatgattccgatggcatatgcgggcgcatcgatttcctgcaaaaagagataaccgtaattgtagtaagatgcatgtgccgcctgcagtaagataacgattgcgagcaccagaccgaaatatttgatgcggaataaggcaaacatgccctcttttcttgcacggtctgtttccggccgttttgaaagaacagctggcgcatgcataaagcttagggatgcgaatatcagggcgcccaaaagcagtgcccataaaatcgcttgatctccgaatatacctgtaaagacggacaggatgacgccggctgaaacaaaacccgcggatccccactgtcggctagtcccataagcctttaattcgttatgctgtacaaggacgccgcaagcgctgtctaaagcaggcattaaagccgggtaaaacacatgcagcactaatgtgacaagaagcaggctttgaaaagaatcagccggaatataacataaaagtgcgagaagcgtcccgattctggcgccgtttaataaggctttgctgctgaattttcctgataaataagggaagaaaaataatgtggaaatccctcttgccgccaggcccagactcataatgaaactggcttcggatacggaaaccccttttatatgcaccatccatcccgtccaatagggcagaaaaacaccccatgtcataaaaaaactaaaaaaatgcagactcatccagcgatatgctttcattcccgttcctcctttaattggcatgttatcatgtaaggacataaagacaatatgagatatctcatatttttggggtggacgatggaaatttataaaggcgagaaaaagcggcatcagttagaaaaacactcaatcgcgcatttattctctttccccgctgaagagtttatggaagtgcgcgaatatgagcgggacgaatggattattcaagagggcaggaggccagacttcctgttttacgtgattgaaggaaaagcgaaaatatatgtaacccaccaaaacgggaaagtttctttaattaattttatcaacaaaaatgattacatcggagagatggaactattacatgaagtgtattacacaaaaggaattcaagcctcagcgaagactgtttgttttgttctgcctatttaccgctgccgcgtgcaattgctgcaggatgcgaaattcctgcgtgagctggctaagtttttaagtgctaaggcaacgcttatggcttcgaaatattcacaaagtctggcgttcccgcttgaaaaccggcttgctgattttattttgcagacggcttataaaggggtttataaagagaagcacgtaacggtctgtgattatttgggtgtatcttaccgtcatctcttgcatgtgctgacgcaattctgccaaaaagggtatttgcaaaaagaggggcggggctatcaaattaagcagtatgattcattgtatgaactggcagaagcgctgcagaataagtagcatgcccagaaaaaacagccacccgcaatttacggatggctgttttcattatacaagctgagcttgtttttttcgtgcctgtttcgcggcgtcgaccatattttttaatgccgcaacggtttcttcctgctgtcttgttttcagtccgcagtccgggtttacccagaagcggtcagtcggacacacctcaagcgcgtcatcaataatttgatagatttcttcagttgccggcacacgcgggctgtgaatgtcgtatacaccgagtccgaggcctttcacgtaaggatgttctttcaggtactctaaaaatcctccgtggcttctgctgtgttcgattgtaatgacatccgcgtcaagatcattgatcgtatctacgatatcttcaaagttgctgtaacacatatgcgtatgaatctgcgtctcattttgcacagaagacgtcgttaaccggaatgcttctgcggcccaagttaaatattcatcccaatcctgcgtttttaacggcagtccttcgcggagcgcgggttcatccacttggataatctgaataccggcatcttcaagcgcttttacttcttttctgagggcaagcccgatctggaaggcgatttcttttcttgaaatatccacacgcgggaatgaccagtttaagatggtgacaggtcccgtcagcatgcctttcatatgtttttccgtcagcgattgggcgtagaccgtatcttttaccgtcatcggttcgataaattcgacatctccgaaaatgacaggcggacgtacgcagcgtgaaccgtaagactggacccatgcatatttcgtaaaggcgaatccggccagcttttcaccgaagtattccaccatgtccgtccgctcaaattctccgtgaacgagcacgtctaagccgatttcttcctgaatgtcaacccagcgcttcgtttccgcattaataaaggcttggtactgttcatccgtccaatcttttttccgccatttttgccgtgcgctccgcacctcggcagattgagggaagcttccgattgtcgtcgtcggcagaaggggaagaccgagtgattcattctgcagcgccaatcgttcttcaaagcttgccggacgggagaaatctttttccgtcagctgattcagctcttctttttgagcggagttcgctcctgttgcgaatgcttttaaagccttaagtgccgattttgattcttcgatctgctcactgacggccgctttgccggacagaagcccttcttttaagacgccgagttccgccagtttttctttagcgtatgacaggccgttcagcaaatccttttcaagatgctcgtcagggtgtttcgccaccggcacgtgcagaaggctgcttgaaggctgaatccataactcctcaacatcagcgtggctgaggatatccaaagccgcatcaaggcgttcttctacatcgattttccaaatgttccggccgtcgaccacaccggctgccagcactttatctttcgggaagccgtgctttttcaattgctcaaggtttctgcctttatcatgcacgaaatcaagtccgattccctgtacgggataagaaacgagttcttcatatgcatcaactgaatcaaagtatgtctgcaggaggacattcagtcctgaaagctcttttgtaatagattcatagaggtcttttgcggcgcggacatcttcagaagaagctgtcacaagggcaggctcatcaatctgaacccatttgacgccttctgcttcaagctctttcagcagctgcacataaagaggaacaaggcgtttttgaatcgctttcgcttctgattcttcgtatcctttcgcaagcgtgacgaatgtatacggaccgacgatgacaggtttcgtttccgctccgaattcttctttgatccggcggtagtcgtcaagctgtttgtttctcgtcagacggaattcaatgctttcgtcatattcaggaacgatgtaatggtagttggtattgaaccatttcgtcatttcactggaaacggcgtcttttacaccgcgggcaatcgcaaagtatgtatcaacgggatccgtgatgctgcggaatctttccggaatccagttaaagctgacggcggtatcaagcacatgatcataatgagtgaaatcagagaccggcacgatatcgatatgttggtcaagctgtgttttgacagctgataagaataaaccgtcaagctctttaagaaacgtttctttatcagtgtttcctttccaataagcctcaagtgcttttttccattctctgttcaagccgattctcggaaaaccgaggttcgaagttttgattgttgtcattaagtctcctcctttaagtgagatgtaacaaaaaagcctctttctcatgagagaaagaggctttaacttcaaaatgcaagcctctcttatctctcagatcacgtctgatggaattagcaccgtgccttatgagacaatcgtctcggcgcaaaaatcacgcgccccatttcacaatggaattacggtcggttgctgttggggtcaaaaggccaatccctcgcccaactctcgataagagaaagtatttcaatttttttgaaaagttacatcatttgttggttatcttatcagcttattcagatcactgtcaatagaaaatctcacaatttaaaaattggtgatgtgacaaactgatcaatcattatacgagaaaaatatcagaaagacagcagctgtgcctgttcggctctttccatcagcacttcaggcgcgtctaaatacagaaatccgttcccggccaatgttttggcgatgtccaaaggaagggtccgccgcacgagctgggcgtagacttcagcctcagaaagcgtccgctgaaacgcgtcctgttcaagcccttttattaaggcaagcgcaccgctcacatgcggggcggccattgaagtgcccgtcagcttcccgtatttatggttgggaagggtggagagaatattttctcccggagccaccaggtcaatctctttattagcgtttgaaaattcagacgatttacgggcgattgagactgatccgactgcgatcacttcgttgtaagcggccggatacgacagttcctctgtacgctcgtctccgtcgccttcgtttcctgccgcgcaaacgaccagaacaccgctttttaccgcatttgtgaccgcttctttcagttcaggcacatcgcttggcccgccgagtgacatggaaataatgtccgccttttgttcaacggcgtagttgatgccgttaatgatccattcgtatttgccgctgccgtttttcccgccgagaactttaacgattaaaaggcttgcttccggcgcgacacccgaaattccgccgtttgaatcattggctgcaatcgttccggaaacgtgtgtcccgtgtccgttgtaatcggaaatcacgtcttctttgcctccgtcatcatcggtgaagtttttcccgccgacaatccggtctttcaaatcaggatgattgatgtcgcagcctgtgtcaaggaccgcgattttaatatccttgcctttaaacccttttgcccacaactctggcgccttaatcactttaatcccctcaggaagctcgttcacatccatgatctgttcatccgtgacataaggaatcaaatgcatttcaccattcataaaaaagccctccttttttatgcttgccagtggatacaagggtgttgctactattttatggcagagcatgccggccggaaagagtcatttgaagcattttcataaaaaaggcgtaatctatcggactaaaaaatttcaaataaatggatagtttgacagctttcattttcattcatgacccgctgacgctataattggaaatgggaaaggagaagagagatgaagataaatgaagcgttatacagctatttttcagaacaagtggatcaaattgcgaaagagtggatcgaaacgatggaagattcggatccgaattcgatttattctttgacaaatcccgtcatcacagaagaactgacggagcaggataaagaattttaccggcatattaataaaatgtatatcatgccggaaaaagaatttttagaagaattcgagcggtgggtgattgagcttgcgaaagaccagaagcatctggatactcccgtccagtatgtggtccgtgaattcatgagaaaccggagactatacatcagttattatgatgcgtttgccgataaacatgaatcttcgtttgccgagggagaaaggaagaaatgggagaatttaattgcacaagtatttgattttacgatttacacgtttgtcgatcatgctgagcataactcaaaaatgcagctgaatgcgcaaagagaaatgattttggagttaagctcgccggttatcacgctgagcaaacggacggcgctgctgccgcttgtcggcgatattgacacggagcgcgccaaattcattcttgaaaatacgctgagcacatgtgcaaaacggctgattgaacatctgttaattgacctgtcgggtgtagtggttgtcgatacgatggtggcgcatcagatttttaaattaattgaagcgctgaaattgatcggcgtcacgtccactttatccggaatcaggccggaaattgctcaaaccgccgtacagctcggcattaatttctcagagattacggtcaagtccaatctcgctcaggctctcaattatcatcaataacatacataacaaaacaggctgccgaatcactccggcggcctgtttttatacaaacaacaatgaaatgagccagcttgcgccgaataacagaagcacgagcaggaaaaagcaccagtcggcgcggcgcacagtaacagttctgtaaaacgtgcggtttcggctcccagtaaagcctttagattccatcgcgatggccgtgcgttccgcctttctgattgcgcctgccaatagcggaatggtgaagcgcctgaaggcggagagctttcctttcagcccggaatcagacgccgcacccctgattctgtgcgcctgccggatgatcaggatttcatctttcagaagagggagaaaccggaatcccgcgataacgccgtatgcaagcttgggcggcagcttacactgctgaatcagactgagcatgaacagaatcggatcggttgtaaaaagaaacatcatcgacaaagcggaaaaacataaaatacgaaacgcgatagaaatcccgagcgccgcgttatcactgttgacggcaatcggcccgagtttaaacagcagattgctcccggttgtcgggacgtttccgaatacggcggctgtccataaagaaccgaaggccagaatgacaaacggaatcgtgaacagcagccattttttcagcggcacacgccccgccgagaggacgcctcccgcaatgatgatataaaacaaagcaggggtgtacggattataaataaatgacagcataatgacgcataacaatacagccgccgcctttattgacgggttaacagcctccagccgcaagttcatttttccgcctcctgtcgtgtttcatccattcataccgcaggggcaaagctaaatgcgcccgctccgcgattccgatatgatcagaaaacaatgagtcgggcgttccgcggtacaccagcttcgtgccgcagagcacaaggatcgtgtcggcataatccgagacgagttccatatcgtgtgtcaccatcaaaacagccgttccttccttttgaatctcacggagcatttgcatacactcccgcgccgttttggcatcctgtccgaaagtcggttcatcaagcatcaaaacgttcacattgtgcataagcatcgtcgcgacgctgagcctgcgtttttgtccttggcttaaagaaaacggatgctgtgaggcatggcgtctcatgccgaatcgggttaacagctgaagagctttctcctttgcggctctgttgctttcaaaaccgaacatcagctcttgaatgacggaatctgtgacaaactggtgttcaggattctggaaaacatatccgatctgtcgccgcagctctttttcagaataggaatcaatcggtctgccgtctattttgatgtctccgcccagcggacggatgagcttggccgcggcagaaaggagcgtggattttcctgttccgttaggaccggcaatcgcggtgattgaacctttttttacggaaaagctcacatcctgaaaaatgacttctgctcctcttgagaatgacagttcgtgaacgctcagcgcgtcttctgccgaaagcgcggcgggccggggttcgggcagagatggtacaggttcgtgaaacagattttctttacacaatgtaaaaggaatgctgacgtgctcctgcaatgagatcacacgcggaatcggaatgccgagctgtatcagctcttcaatccttgtttcaaagataacatccgtctctccgtccatcaccttctgacccgtttcgtcaaggacaatcgtcctgtccatccacggcgcccagtgatcaagctgatgttcgataacgagaaggccgaagcctttttttgcttgaagatctttgatcagccgcactaattcacgtgccgaatatggatcaagctgtgccgtcggttcgtccaaaataatgagttccggttccatcgcaatgatacaggcaagcgccactttttgttttgaaccgcctgacagcgaagcgatcgttcgcgttttcagatgagtgatctctaatttttctaaaacgtcatcgatgattgcgtccatatcttcttttgtatattgcaaattttccaggccgaaggcgatttcatcttcaacggtcagcatgcaaaactgctggtccggatcttgaaacacgacgccgatagatctggcggcgggttctgtcaggtgtgaaagaggtgttccgtataaagaaacggttcccgattgaaccccatcgcatgcttccgggtacagaccgtttaaacagagagcgagcgagcttttgccgcatccgctcggcccgagcaataaagcccgctctcctttgcggagctgaaaggacacgttttgaaaaatcggcttttcatcctgatcataagaaaaggtaagacggccggcggatagaaggggttcagatgcctgcatcttggttcacctgtttctttttcttcttgaattgttttccgagcgccatgccgttcagcactcctgtgtaagccagcgcatcactgattgctttgccgagaaggccggcaagaagcgcacctgagaccagacggatgagaagcatgacggctaataaacccggattcaaaacagagtatccggaaacgaacaagtcataaatgaagcttgtcacagaagaccccataccggataaaagaagcacgggcagggtatacacccgccagcgtgtcgctaaaaagattgcttccgcaccgattccctgtgcgatcccgatcagaatcaccatcggtcctgacggatttccgagtaagcactccacaaacgcggcgatgatttcagaaacgagagccgctcccggtttttgaataatgtacgcggcaatcaccgagacgataaaccagataccgtaaatcggttcgtagctcatccggccgaaaaatcctgccgctatattgcttgcatgagttgatactaaataaatgacagcaaatacaacactgatgacggacatgacgacaatttctctcattttccaatttttcattgtgatctcctgctttcttatcgatagtcgtaagtatgaaagagttgattttacgaaagacgattgatcgtaagtttcatattgcggtgtcctcccccgttttttaatgaaaaataaaaaactgcatatccgagggaatatgcagcagcagaacgaaaacgcatggggaaaaaccctgcgctccggtcaatctgcacttccccacgctggtattatccagatcgggttataagggatcaaaacacgcctgccgcatgttttatctcagccgataacagcacccctagtgcgtttcctatacagttttttataatgacatcatcatagttgatcatgtctgatttgtaaacagcctttctccgaacagagtttggaatcggaccggaagatcattcataaagataagaagagcccttttgatcaaaaggaaacggaggacatctatgtttgttcatacagtgcagtctggagactcgttattttccatcagcagaaagtacggataccctgttgacagcatcagaagcgtcaacgggcttgaggaaacgaatatcgttccggggcaggcgcttttaatccctcttaatgaatatacggttcagccgaatgatacgtatgccgttatcgcaggtaaggcttatgtgccgcagatgcagctgatgcaggcaaacccggatattccgccgaaccggctgcggacgggtatgaaagtgaagatccctgatatctctaactatcttgcgggaaccctgcaattttatgtcattcggacgcctgaagcggatagagagctgattaatgattttgcgccgtattcttcggcgatttctttgtttgaatatcatttcggcccgaatggagatatcatgaacgatttaaacgacagaaccgcaatagaaaccacatggcagaacagagtgcgcccgcttgccgtcattacgaatctgacagaagggggattcagtccggaattagcccatcaagtgctgcagaatccggcggcaagaacgaatctcgtcaacaatatcgtctccttaacggtaagaaagggatacggcggtgtaaatatcgattttgaacgggtcagagaagctgacagggatctcttcacaggatttctccggcagttaaaaacccggctttcagagcatcagctcgcgttaacgatatcggttccggcgaaaacaagtgatgcagtgccgtggctgaggggatatgattacggcggaatcggagccgtcgtcgattatatgttcattatggcgtacgactggcaccacgccggcagtgagccgggacccgtggcgcctttaacagaggtcaggcaaacgatcaattttgccatcagcagggtgccgagaagaaaagtgattctcggtgttccgctgtacgggtatgattgggtgattccgtaccgtcccggaacgatcggatctgccatctccaatcagcgcgccatggaaacggcgatgaagcatcaatcaatgatccgttattcccagcaggagcgttccccttacttccggtatactgatgaaaatggaagaacgcatgaagtgtggtttgaggatgtgcggagcatgagtgaaaaaatggttctcgttcgggagttcggactgcaggcgatcggcgcgtggcaattaacgctcggtttcaaaccgggcccgtggctgcttaggaacttttttacgatccgaaaaatatagctgcatgtcccgttccgcaagtgattttttctttcctatgataacggagcttcttttggacaatctaaaattgagaaggaggtctgtcatatgaagaaaagggaagagcagtatatcaacgaggctgagtatgtaccgcatccgacaaaagaaggggaatacgcgctcatgctgcatgaatcctatcatttcctttcagaagacgatgaaagcgatttgccggaataagggctttatgcctttattccgtttattttataggcatgtgctgaaatcacaaatttaaggttgacacattccttttttttctgtaatctcagtgtgtcaattcaaataagaacttcgttaggtgaggctcctgtatggagatacgctgctgcccaaaaatgtccaaagacgccaatgggtcaacaggaatcatcgacataaggtgattcttaacgcagctggatggctgtcctatgccatacagtgctaaagctctacgattggaggccccgcacgtttatttgccgtgcttgttttcgccttcatatcggaaggttttttttatgcctcaaaacgtacacgactgagcatgataaggaggtgcggagtatggattctccccattcgagtatgtcagaagaagtacccatatacagccagataaccagtgacgacatgatgaggagacaaaccgccgcacttcccttgacggacggcgcgtctccgtaaaggaggtacgagtcccgatggtccaaaacatgacctatgacgaactcatattacgcattatcattttattgcgggacggaaaaataaaagaattccgaaacatgatagatgagcttcagccctatgacatggcatttttatttaaagaaatgccggaaaagcaccgggcccgctatctgtcatatatgacggttgatgacatcaccgacatgatcggagagctggagcgggaatttcagcttgccgttttgcataaggtcggtaaaacgaaagccactctcgcaatgaataaaatggataacgacgatctcgccgcattgcttgaagagatggatgaagaactgaaagaacagcttttatccagtatggaggctgaggaatcaaaggccgtacagcttttgatgaactatccgcaagaatcggcgggccggatgatgacgaaccgcttcgtctggattccgcagcattatacagtaaaagatgcggtcgtgaagctgaaaagctttgcagaaatcgcagaatcaataaattatttgtacgtgattaatgacagcaagcagcttgtcggagtgctctcttacagagatttaattctcggcgagcctgacgataaagtgcaggatctcatgtttacgcgtgtcatctcggccggggtgctccaagaccaggaagaagtcgcccggctgatccagcggtatgactttttagccattcccatcgtggaagaaaataatgtgcttgtcggtattgtcactgtcgatgatattattgacgtcgtgattaaagaagccgatgaagattacgaaaaattcgcagcctccggtaaggcgattacatttgatacgaaagcatacgtggcggcgtaccgccgtttgccgtggctcattctgcttttgtttatcggattgatttccggaagcattctgaattattttgaagatacattgcaaaaagtagtcgccctcgcgtttttcatgccgatgatcgcgggaacgacgggtaatacaggcacacagtcacttgccgtcgtcatcagaggactggctaaagaagaaatgaataaaaaaaccatctttaaactgattttccgtgaattaagaaccggtatctacatcggcatcgtctgtgcgatcgcgattacgatcgtcgcaaccgtctggcagaaagacttaacgctcggttttgtcgtcggttcatcgctgcttgcaacgttgattatcggtacgatggccggaacgatcgtccctattattcttcataaactgaacattgacccggcgattgcgtcaggaccgctgattacgacgctgaacgatattttgtccttattaatttatttcggcattgcaactgcatttcttcatgctttataaaaaaagtccgtctcacaggaggcggacttttttgatcagcggtttttatacttaaaatgagcattaagctgtccttccagcatttttttgcggagctgcgggtcgtttttgagagcctgttcttttttccgcatgtcttttaaaatctcagccgtctgcacgccgtcttcccgcttgttggcaatatccatcagccgctcaacgtccgcgaaggaatactttctcgttccccgtgatgatcgctgcgggtagattaatttccgttcttcatagtatctgatctgtctgactgacaatccggttaattcgcttacaatgccgatcgagattacttttttatctttgtaagattgttcgtctgtcgtcatttttccacccctggatgtcttttactcatattatataagaaaaaaagagaaaaaacctgacgcttgtcaggttttctgacgcggaatagaaaattttagaaaaaaagcggcagaaaaattgacaaggttaatgcatggttctgtgcccccgttttatgcttattgtacagatacaatgaggaggaaggataggaatggagaaagaaaaagcggtttcgctggcaaaagaaatcattgaattagatatgaaacgcgatgaaatgctggaggcgttcatgcagcttgccggggaacacgcttttccgctgctcagagccgtccagaacggtctttaccgaaaaacatcataatctacagaagttttacaatggctttatacatctttgatataaaagcgttattctgatcatagaataacggaaaacaaaggaggccgtcatgagtcgtttgcttcaaaatgcattggataaagagagaaaccattattccaaaaagcttctgcagatcggagtctatacgaaagaaatacttaattccatgacaattacggagctgagaaaggaatacgcgtatttttttcggaacattccctataaagaacggaacccttatacaaattaaatgatgtataagggtatttttttatataaaaaagaaggaattctgaaaaacggcacgaatagaatataaaacaaagaacgactcttatgaattgtaagggtttacattatttttttataaaaatcttaaatacggggtagatatgatgagattatcatttaacgaagaagaagtgatgcgttcgatgaatttgtacaaagtttttgcaagggctttcaagagtgtgtctgaacacagcatccgcgatagtaaagaacacggttttaatccgactgaatttgccgttttggagctgctctatacgagaggaccgcaaaagcttcagcaaatcgggtcgcgtcttttgcttgtcagcgggaatgtcacctatgtcatcgacaagcttgaaagaaacgggtttttggtcagagaacaagacccgaaggacaaacggtctgtttacgcccatttaactgataaaggaaacgagtatttggataaaatttatccgattcattcattgagaattgcgagagcgttttcaggacttatgcctgaggaacaggaacagctgatagccttactgaaaaaagcaggaattcacagccagcatttgcttttccgttaaaagaaagcggatacagacactcttcttcatgaagagtgtttttttctgtttcggacagtagagcctgaagcggtttttgcataagctgatacagggctgcatcattatttaccaatcataatgtgtcatgcctcatgccaaaatatgagggtgctttgaatataaagaaggtgaacatgtgagaagctgtctgctgtctatatggtacttacttgatccgctttatttcttctttacccggctgacgctgattgataaacggcaatcgaatgtattccgcgtccgtttgactagatataaaggaaaagatgtcatcctgagcgacggaaccaggattaaaaaaaacgacgtgttagttaagattcatcttcataatgtcaaactcctgaaagagctgcagcctattgaaagcgcggtcagaagggggattatgctatatcagaaggtatatcaatccatgcctcatttagcggattatattaaccagcataaacggaaagacgagattaagggagtcgtcggcattacaatgcttcataaaggagcggcgagactcggttttgatgtgataaaaccgtccagcggctgctacaggctgtttaagaaagcggcccatcttccgattttatactttactgcaaaacagctcaccctcaaaaacattccttactcctgctatttatttatttccaaagaaaaattgatgtgcacgtatcagactgaaaagagctgaccaaaagcgtcagctctttctcttgatttgctcaagcacgattgaaagcgggccgtcctgcggattccggtaaaaatcataaaacggatctccctctgtcctgacgcggttcactactgtatcgatcgtataatcatcaggtgttaaagaggagttgacttcgctccaataaaggggagccgcaaccgttcccaattcgttgccccgggtcgaatagggggcgataatggttttcccttcggcatgctgcaaataatctaggtagagcctgccgtttcggtttttgataaaccgctctgtcgtaaaaagatccgggcgcgtcctgacgcaataatcggcgatgagcattgtgaacgcacgggtttcttcataggtgaatgcttccggtgaaagcgggatgtaaagctgaatgcctttatttccggagagcttcgggaatgacgtcatgctgaatgagtcaaacagctgtttcagcacatgcgcagcctccactgccataggaaaatcattccttgacggaggatcaagatcaatgacgatttctgcgggcctttcagaatgcactgtctgaaacggaacgtgaaattcaagcgccagctgattagccagccatagaagtgacggtacgctgctgcatacgatgtgctcgtggctcccgtcaaacacgcttgtgacaaagtccggcgtgtagtccggtttgtttttttgaaagaaagattcgccaggcgcgccgtgcggataacggatcaccgtgacggcccgatctttaagaaagggcatcagaaaatcgctcattttcaccatataactaaggaaatctgctttcgttttttcacgttttttaaaaacgatcttatccaggcttgtgaactgcagcttcggcggcagcgttttagagcggaggataagctgctgatacgtgcattccgtccaatccatttcaaactgaaaggacacaaaagatacttcacgcagcgtgtcctgcaatatggttaaatactgcacggtcatgcagatagaaggctcaagtgtatactcgccgcttttttgtttttttccgtgggtctccataatggttctgacggcgtttttttcttccgcctgcatgccgtgggaaacggaagcgatcgggacgacgatgccgtctttcaaaacagaggccgtcacatacccgttcttcggattgaatccggttaatagcacgtgagccgttttcatatgtttatacttctgccagtcgggagagcgtttattttccgcccatccgctggaagtccttttggctacgataccttctccgtcatggcggacgaccttgtcccaaagcgcgtcaaagtcagtgtgctccggaatgtattgaatcgcttcttccgctaagtgatgagggcaggcgggaagatttgcttctttaagcagattggaaagggcgcgcttccgtttcacatacggtaatgagacggtgcccgcgccttccagaacgaggagatcaaatgccagaaagcggcacggccgtctatcagcggtgcttttaattgcttcggttcgttttaaacgtccgcggatttgaagatgctcaaagtccgctctgtacggattgattaaatagacaagctctccgtcaagcgtaatggggaacctgtctttcatgtgctgaaaacaccgggccgcaaaagccgtgatttccggaaattgattcgtcagcgtctgtccgtttctgctggttaatgtaacaccgttttcgtctatgcggagaagacagcggaatccgtcatattttacctcatagcgccactcactgccttcaggcggtacagaggtcaaaatcggctgcatcgtcagcaccatgattaagacgttccggctttttgtctggtcgtcttctgctttttgcctccgccgccagctgacgctgtgtcttttgtccgtgccggtgcagcctgttcgcgattcggccgcttcgtccggtcaatgcttgcctgaagcgcgctgacaagatcaatgacatcttctcgcgggccggcaggagcaggtgtcacgcccgcttcttcatgttcgagcttatcgttaattttggcgagaagggctttccggtatgtgtcttcgtattgttccgggtcaaactcggttgtcagctcattaattaatgtgatcgccgtctgcagctctttttcattaacggctgtctgctcaggaacgcccggcacatgtccggcatttctgacctcatccggataatgaatggattccatcacgatgcagttgtcatacacgcgaagaatcgcaagctgctgtttagagcggatcgtaatggaggcaatcccgattttacccgtcgtcctcagcgcttcccgcagaagtgtataggcttttgtgccgttgtctcccggcccgacataatatgaccggttaaaataaatcggatcgatttcctgcagctggacaaagtcaacaatctcaaccgctttttcttcatgttcctgttttacgtctttcaagtcttcgtctgtcataatgacgtatttcccttttacatactcatagcctttcacgatttcatcaggctccagactcttttcacatccggtgcagattttttcgtatttaatcggcgcatggtcttctttatgaagactgcggaattttatatctttatcttcagtggccgcaaagagcttgaccgggatattgacgaggccgaaactgatcgaacccttccacatcgtgtgcatgaataaaaactcctttttgtctttattgtggataaacgggtccgttccatgtgtagcaacttatgggtgatgcggcgttcatggagcggctattctatttcctcatgcggtaatagccggctgaaaaggaaatcgcatgtgaatcggtaagttctttaaatcgctgaagtccccgaaaatcatcaatggttgatcaaaaaaattatacagaatcattccccgggaaatgcccacgcatttccatgtagtgaccgagagaatttcccgctcccataaaaacagattcggcgatggcaaagatcccggcaaaacgcactgcccatatgaactgaattccggtcagcgccgcttaccgcaaatggtaactttccggagatcttaagtgatgtaaccgccgccagacgagcattcaggagacaggcgggacgttgtattgcgcatgtcattccctcccgctataccgatctgaaacgactatatttataacgggcatgtctaaaagatatttcagcctcaaggttttgtgttaaaatcattcttaagtttcagaatatagacgtaagccgggagtgatagatcatcgaagatttcatcatatcaataattgaagcgtttaaaagcttatcttacgccggaatttttttggcgctcagtatagaattcatcccggcggaaattgttcttccgcttgcgggctattgggtctcaaaaggggatatgacgcttgccggagccgtgtttgccggttcgctcggcggtgtttcaggtccgcttgtcttatatgggatcggcaggctgggcggtcggccgtttttgctgaaatatggaaagtacatatggataaaacccgaatttctgcagaaatcagatgatttctttcagaagcacggaggtttggtagcgttcagcggccgttttataccgggggtcaggacgctgatttctttgccgtgcggcattgcgaagatgaatatctgggtgttctctctctatacatatgcagcgatgctgccgattacatttgcttacgtatacctcggtatgaaactcggggaaaattggaaaagcgtcggttccattctcgatcaatatatgctgccgctcggtatattcattgtgttgcttctcgttctttggatgtttttgaagagaagaaaacagcgggtcaaaacagaaaaaatttctcaatttgttaaaaaagttaagcgttgacaaatgatgaaacaggctttatcatgagcgtataaacaaatatttcttgaaatcccaaaggggagtagcgtccggatattccggaaacaaagtcgtcaattcatggatcatatccatcgactttgttggcatgccaatcattcatgtctagcaagacctttgccttatatcggcaaaggtcttttttgcgtaaaaaaaccgccggtataagctcggatgatagaaaaaagaaacggagggaatggattggactttgcattattattggagtatggatgggttcttctcgttttaatcgggctggaagggattttggcggcggataacgcgctggtgatggctgtgatggtgaagcatcttcctgaaaaacaaaggaagaaggctttattttacggattggcgggcgcatttattttgcgtttcgggtcgctgttcgccatttcatttctggtgaatgtttggcaggtccaggccgtcggcgctttatacctgttttacattgcggtcagccatttgctgaagcggtatgtattcaaagataacgccgggcagaaaacgcagaaagaaagcgggttttggcagactgtcttgaaagtggagctcgcggacatcgcttttgccgttgactccattttagcggcggtcgcacttgccgtaacgcttccgggaacacggcttcctgccatcggcggcttggacggcggtcagtttctcgttattttagccggcggcgtaatcggtttaatcattatgcgttttgcggcatcaatgttcgtatccttactgaaaaccaggccgggccttgaaacggcggcatttgtgattgtcggatgggtaggcgtgaagctcgctctttatacgttggcccatgaggaactcggtataattccggcagatgtcatccattcggcggcctggaaaatcattttctgggcggttctggctgccattgcggtttgcggatggtttatgtcaggagcaaaacaaacagagtccggcgcggcatcggaaaaaagagaacacgcgtaaaatgatcaaaaagggagtctggctttttagaaagcaggttcccttttttgtttgaagcgcttacatttaagacatatgataacaattttataacagcattgttacaaaaaacacagagaaaacccccttaattctgcatgggggcacgaaatcatgtatagtacgtcttattggcttgtcataattgagacaaatgaaatcgatttctctttttcttcctttgcgaatccctactaaattagctatgattatgagtagttatagggaggaactgaggtgaaaccagtgcttagccttttgtttaaattgggaaaaaagaagcaaacgcttgaaacatctgttgaaaaaatacaaaaaggcgacaaagatctgcagaacgatttaatacagcaatataagccttttatcgcgaagacggtttcatccgtttgtaaacgatatatagatgaaaaagacgacgaattcagcatcgggctgatcgcgtttaacgaagctattgaaaagtattcggctgaaaaaggtaattcgctgcttgcatttgcagagctgattataaaaagaaaagtgatagactatatcagaaaagaagcaagaaccgctcagcatatcaatatggatgtgcaggagggcgacgaccaggaatcttcgcagagccttatcgaagcggagctttccattgatgaataccgcaaacagatagaacaggaacagcgccgggaagaaattcttttttttcagaagcagctgaaagaatacggcctgtcttttaaagagctgctggaacaatcgccgaagcatactgatgcgaggcagaatgcgattaaggtagcctacacgcttgttgaaaatgaagagctggcgtccattttgcaccagaaaaaacagcttcctgtcaaacagctggagcagcttgtgtcggtcagcagaaaaacgattgaacggaaccgaaaatatatcatcgccatgagtattattattaccggtgattatatttatttaaaagattatcttaaaggggtgttgcactcatgagaagagggatcatagtagagaaaaataaaaaattcgtcacgttgctaacccctgacggacaatttttaaaaacaaaaaatgatcaccgcacttgtgaaatcggagaggaaattacgttcgaaggcgaaacgcgtatgggaagaagggccagcttttttgattttctgaaactgcgcccttttaaattgggagtgtttacgatgactgctattattttgtttattttaattttgctcccggttttttctgataacaaagcttacgcgtatatgacgcttgacattaatcccagcattgaaatggctttaaacagcaaatatgaagtcattgaactgacaccgctgaaccatgacgccaaacaggtcatcagtgacatcggagattggaaaagcagcgattttaaggaagtcatcaataatattattaccgattgcagcaagcatggatatgtaaaggaatcaaaagagattttaatttccacggtttatgaaaatacagatgacaatacatataaaaaaggcgttaaaaaacagctggctgacatgactgaaaaatataagggcacctaccaggtccaatctcttgaatctgatatggaaacaagagaaaaagcaaaacaggaagggatgtcaacaggcagctacataagaagaaacgaaaagaaaacagaagaaaaacagtctgaaaagcaaaccgacggcaatgaaacagatcaaaaagataccgaaacagacgctgatcaaagcaaacagccggacacagaaaagccggcggctgatgaaaagacagctcctgatgaagaaaaggcagcagagaagccggaaaacaatgaaacaacgcccggcacggaagaagcgaagccggacagtcaggacggcagtcagcaaaccgacaaaaatgcagcttccggatcagaagaaaacacacagaaggaacaagatggggaaacagagcagcccccaacacaaaatcctcaggaaaacggaaatgacaaagagcctaagcaaaagtattacaatcattactggaatcagcggaatcatgatcgcaatgaacattgggactcctatcggcatcatgaagattcgtcagaccgcaggaatccgaacggctaccggcacggaaaggagaatgccgataaatatcaaaattcgccgagaagtcccggcgaataagctgcattattgatttttcccgtttaattgtgattgagcctgctgtacaagacgttttgtcatttccccgcctacagagccgtttgcgcgtgctgctgtatcagagctaaggttcacgccgaattcttgagccacttcgtatttaaattggtcaagtgcctgctcagcccctggaactaagagtttatttctgctcgccatctttttcatctccttttctctggcaagatgtgtttacgcattttagtttcaaacggaacggtattgattatgctggcaattgttgtacagcaaaaaaccccggcgcagacaccggggcgaagaagcgttatgaattataataaatggctggtcattttgtaggctgaggcttgaatatggaaagtcaaaacggagagcaccgtgacggcgatgatggatctgatatcgttccattgtccgcttccgagttctttaaagcagcctttgagcttgtccgtctgctcttcgacgagctcctgcaggctcgtttccttcatcggcgggtttgctttatgatgaagataatcaatcacttgggcgcagctttcatagtagctgatcgggctgatgacgtcgtctgatctgtctgtgatcgtgttaaaagcgatttttaatatgccgcgtatatgttcgaagtcataaattgattttaaatcacgtacaatgagaaggatgacagcttgttcaattgtatattttttgccgagtaaggggtggccgattaaatctttaatatcgcgcttcacccagttttggacggcggttgattttaaagacgtcagctcgcacagatttcccagctcgacaatctcgttagttgaaagcccgtattcctttttctctttttttcgttcgaatctcgtcagaaattcagggatatgcagacggctttccgcttcatccaatgtcatttccgctgattgcaataagatttggagaggagttgcgtctccttggccttttaacgcgtaaagaagccggaccatatcagttcgggtcagtttaaacgtgttcatggttcacctctgattgattacgtgttcactttctgatatcactgagaattacatttacatcatacgtcgaaattgttgcattttcaaacagatcatttataatttaattaaataagttcttttgatcttaaaaaagacggaggtaattatggcgaaaagaatatttctgtttattttaacgaaccttttggtcattacgacaatcggaattgtgcttacgattattacaagcgttaccggtgtcggctcgtatatacaaaatggccgcattgatctgatggcattgctcgtgttcagtcttgtcgtcggttttgtcggttcttttatttctctcggaatgtccagatggatggccaaaacgatgatgggcgtccgggtgttaaatccgaagaaacagtcactcagctatgaagaacagcaattggttgaccgtgtgcacagattgtcccgtgccgcagggatgacgaaaatgcctgaagtcggcatttatcagtccccggaggtcaatgcttttgcgaccggaccttctaagcgccgttcgcttgtcgcggtttcttcaggtttattgcagcagatggatgatgctgcggtggaaggggttcttgcccatgaagtcgcacacatcacaaacggtgatatggtcacgatgacgctgctgcagggaatcgtcaatacgttcgtcgtattcctttcccgaatcgcggcatgggttgcaagccgctttgtcaaagaagacctcgcaccggtcgtgcattttatcgcgatgatcgtgtttcagattatcttttccattctcggcagtcttgtcgtcttcgcctactcgcgccacagagagtttcacgctgaccgcggcggtgcagaccttgccggcaaggataaaatgattcacgccctgcgtacgctgaagtcttatacaggacatgtgaatgaagaagaccagacggcggtgcagacgttaaaaattaacggcaaaaagcattcgtcactgttctccacacaccctgatctcgatgagcgcatccgcaggctggaagcaaaataataaacaaaacctctgacaatcgtttcagaggttttttgtttaaagatcggcaaattacataaggtaatgaaaaatctttcaaaaaaggcctttaaaaattctcccaatatcattagaataattacgtactacatttgagaggcagaaggaactatcttatgaaattaaaactgaagaaattcatacagatcttgtcgcctgcacagctgattgcattatactattttcttgctgtgacggtggcatttattttgctaagtctgccggccgcccacaaacaaggggccagctggtcgtttatagacgcgctgtttacggctgtcagctcagtcagtgtcaccggtttaacggtcgtcaacacggctgatacattcagcacggccgggattgtcattttggctttcgtgcttcaattcggcggaatcggcattatgacgctcggaacattcgtctggctcattatgggcaaacggatcggtctgcgggaacggaagctcattatggtggatcagaatcaatcgcagttttccggtatcgtcaacctgatgaagcaagtgctgtttttgattttattaatcgagtttttaggcggcatcatcttaggaacatattttttaacatactatgattcgtttgaacaggcgtacttgcacggattctttgcgagcgtcagcgccacgacaaacggcggctttgatattacgggaaattcactcgtcccgttcagacatgactatttcgtgcagtttattacgatgcttctgattattttcggtgcgatcggttttccggtgctcgtagaagtaaaagactttttgttttcaaaacagcgcagatactcattcacgctgtttacgaaaattacgaccgttacgttcggaatgctcgttttgttcggagccgtgggcatttacgcgcttgaagcaagccatgttatgaaggggaaaagctggcatgatgttttatttttatgtctctttcaatcaactgctacgcgaagcggcgggcttgcgacaattgatatcagccagctgtcggcgccgacattatttttcatctgcgccctcatgtttatcggcgcatcaccgagctcggtcggcggcggaatccgtacgacgacgtttgcgcttaaccttcttgctctgtttcattttgccagagggaataaagcggtcaaggtctttaaacgcgagcttcatcaggctgatgtcatgaagtcgctggtcgttacgatgatggcgattctgctcgtgttcgggtcgacgctgattctttccgtgacggagacaaatcagacgctcctcggactgctttttgaagtgtgttccgctttcggaacgaccggcctgtcgctcgggattactccgcatttaagcgatatcggaaaatgtgtgatcatgattgtgatgtttatcggccggatcggcattttgactttcctttatttgatcggccgaaaagaaatcgaagcaaattatcattatccgaaggaaaggatgattatcggctgacaccgcttttcagaaagcggtgtttttttattgccgtaaaatggatgagtggaaacagtttctttggagattctacttgtaaagaggtgacgtcattgtttgccgtattttggaagtcggtagttatgatcgcggtcggtacctttttattgcggattgccggacggaaatccatcagccagctgtcggtgacccagacagtcatcatgatttcgatcggctcgattattattcagccgtttattgaacataatttatgggaaaccattttcgcggcggcgatttttattgcggtactgattctgatggaatatttagaaatcaaatcaagcttttttgagtttctattttcaggaaaaaccgtcgccgttgtcagaaacggaaaaatcatcccggaaaacttaaaaaaaatgcgttttaccgaagaccagctgtcaatgaggatcaggcaggaaggcctcggagacattcaagattttaaatatgtgctgcttgagccgaacggacagatcggctatgaactcattgatgaggccaaaaacgtgacagtgcgcgacttaaaaaaaatgcttaatgaattcaaaacagatttgctgacagaaggaggaaatcaaatgaaacgcaaagcagcaaagaatgaagctttgaccaacaacaatacaccgactgagagcatggacaaagatgcatacaaaacacaatatgacggtgatcccggactgagaggcgcaaaccgcaaatcaaaacacggcaaacaaggaggcgagtaatatgacgaaaaaaaaccgccacagcaaagacatgcaaaaccataaaaagccgatggaccctaaattgcttgaagaagagttttcaagcgagctcggtgattataacgccggaaaatggattgaaacgcttgaacagacgaagccgaagaaaaaagaagacggcaaaaaataaaaaatacctcttaagcggcaacgcttaagaggtattttgcattatttcgaataagcaccgtttcttgttcctttcaccgcttgaagcaagccggttatccgcagctcaataaacggctgtgcggccgttttcaccgcattgctggagagaatggacgtaagagcggccgttaacattaagagcatgactaaattctgataatcagacaagtgatcttcaagcccgatctgccgcagcgtttttataatgaatccatgcagcagatacacgtaaaacgttctcgtaccccatttcgtaaagaaataacgcttttgcggaacgagcgccaaaaagctgaaagtggcggcaaaggccaaaacataccagccgatgcgcgacagaccgctcaacagcgacactgtgccgaatgtagaataaggctccgatccgaacagccacgagtaatcaaaatcaatgcaccagcataagaggaaaacaatccccagtacgcccgcggcaatctgcctgcctcttttagcccgaagcaaatcaaagtgccgtttctttaaataaaacccgacgagaaacatcggaagaaagacaaacgtccgtgaaagactcagcgtgctgctgatgaaatcgagatacccgatcatgacggcaagcccgcagctcgccccaagcgcccacattttcggcagcttcgtaaagggataaagcagcagattccaaaagaataagctgactaaaaaccagagagaccactgcggatcaatcggattgacgcttgccatgctttcatcctgaatcaaatagtaaaaaaccgagtaaatgccctgaaaaatcaggtacggaataatcagcttcacagccagcttcttcacataacctttccgcttaaagttttttgcgaaatagccggaaaccaggataaaggccggcatatgaaaagtataaatgaatttgtagagatggagcataaactcatttccgttaataaatgaccggaggatatggccgaacaccaccagaaaaatcaagataaacttggcgttgtcaaagtaactgtctcgcgattttgtcatagcatcaccttctcttcaaaaatcatccactgcatgattatttcctgttggtgttcattttaaaataaaaaacaaaaaattgaaggaggacaaaagggattgttaggatgatgtaacggggaggtaaggatcgtagaaaaagactttaacttgtcatatcattgaaattttctgaaatgtatagggcgaatgaaggaagatgaggtattttgtagaaatattgaaggataggtttttgaagaaggagtgtactgaatggctgaaactctggatttgcaaacaaacgagtcgctgaaagagcagctgaagcggatgaaagaggaaaatgaccgcctgaagagtgatttgaaccggtatcatgtgattatgaataacacgcttgatgccatttttatatgccgtaaggaaatgaaaatcgtccaggcgaacgaggctgcggcccggatgatgcagattgaggcagagagccttattaaccgctccgtcctggactttttatattccgtgcctcaggaagaactgaataaggccgtgaaaaagtttttaaaaaaaggccatctgtggaaagaggtgccgattaagcttgacagcggcgcgacgaaatacattgaattcctcgccagagacggaattggggaggattatttttttgtggtgatgagggacatctcctctaaaaaaatattagagcgcgaattctccatgaacgagcagctgtttaaagatttgtttgacagggctgtcgacggcatcgtgctgtttgataaggacggcgggtttattgatgcgaacctctctttttgcaaaagctttgagatcggccagaatgaattgtcccatctgtcgctccgccattttaccgacggcgaaaacaaaaagcatctgaaagaaatctgggaaaccctccgcagaaaaggaaatgccaaaggagaactgcccgtcaagcttcggtccggcgaagagaagctgtttgaatttacgattacgtccaacttaatcagcgggttctacatgtccattatgagagatataacagagaaacggttgatggaattgaaactctttaaaagcgaagagcgattccgcgaaatttttgaaaacgcgatggacgcgattgtcatttggtctgatgacggaaagattgccaaagcaaacgaatcggcgtgccgcattttcgaactgccgatggataagctgctggagacgaatttatgtacgtttatcgttgatccgcagaaaaaatacaagcagattaagaagaaatatgaaaaatacggggaaatccgtgaagaaatgctgtttcagatggcgaacggccaatacaaagagcttgagtttacatcaaaacgaaccatacttgaaggtcagcatttaaccattttaagaaatgtcagcgatcgtaagcggatggaaaaagaattgcgggaaagcgagctgaaattcagaaaagtattcaacggctcaatggacggcaaggtcttatttgacaaccaattccgcattattgacgcgaatcctctcgcaagccgtatactcggcatgccggatgaggagctgagagcgtacaccgttccggatattctttctttatttgatattgaaaacgcgggtgttcccgccagaaagattgatttagaaggaatggataatgaaatccccttcctgttaagcagcagtgacagccgcaaactggaattctccttcaaaagaaatatcattcaaaatatgaatctggccatctttaaagatgtcacagaggccaaagaacttgaagagaggctgcggaaatccgacactcttcatgttgtaggggagctggcggcgggcatcgcccacgaaatcagaaacccgatgacagcgctgaaagggttcattcagcttcttcaaggaagcattgaaggcgaatattccctgtactttaacgtcattacctcagaattaaaacgcatcgagtctatcatcactgaatttttaattttagcgaaacctcaggcgatattatatgaagaaaaagacgtgacgcagattctgaaagacacggctgatcttttgaatgcccaggccaatcttgtcaatgtgcagattcatctgaacctgaccggaaacatcccgccgatttactgtgaaccgaatcaattaaaacaggtgtttatcaatattttaaaaaacgccattgaagtcatgccgggcggcggcaatatctacgtgaccatccagccttctgatcaagaccacattttgatttcttttcaagatgaaggaacaggcatttccgaagacaaattaaaacgtctgggcgagccattttacacgacaaaagacaggggaacgggcctcggtctgatggtcagctataaaatcatcgaagaacatcagggacgcattcatgtggaaagtgaagaagggaagggcacggtttttcatttgacgcttccgatccggcagaataccgaagaaagaaggagcggggaatgatctgttttacaagtgtaaaagcgccgtttggaaccgttatcgtaacagaggaagagggctttattaccggcctgtttctcaccggggaagattttgaggaatggcggaaagacgcgcccggcgtaaagccgtgcgaaaccgctttgctgtcggaggcgaaacagcagctggcatcctatttttcaggagaaagaaagcaattctctctgcctttgagacaaaaaggcacaccctttcaggaaagggtatggaacgcgctgacgatgattccttacggggaatcccgaagctacggcgatatggccgaagcgatcggaaaaccgaaagcggtgcgcgccatcggacaagccaataaacgaaaccggctgccgatttttgtcccgtgccatcgggtaatcggcaaaaacagcgccttaacgggatacgcgggcacgaagacggatgtaaaagcggtgctgctgaacatcgaacaaatatcctataaagaaaaataaaacatatggcacgttccgtttttttgcgtccgacatatcattttattaagtgaaaaaagttggtctggtgaaaaaggaggacgaagcctgatgaaaatgagccgtccgcaaaagatagccggttatgcagagctgttttttaaaatgcatctcattacagccgcccaaaaagatgaagtgattacattgtgcagacaaaaaaaccgctgacattgcccgaggcaacatcatcagcggtttttcagctcagctgacagtctgcgaataattgttcaatttcttccgtgtaagaaccggtcacaattcctttctcggtgataatgcctgaaatcaggctgcccggtgtgatgtcaaaggccggattgaagaccggcacatcttcgggagcggtgcgtatgcctgagatctgtctgacttcatccggatctctttcttcaatcggaatctgatcgccgttttcaatctgcaagtcaaaggtcgaaagcggtgcggccacaaaaaacggaatctgaaaggcgtttgccaaaatagcgaggccgtaagttccgattttgttggccgtatctccgtttttagcaattctgtcagcgccgacaatgactgctgatatatgtttttccttcattgtatgggcggccatgctgtccgtaatgagtgtgacatcaattccgccctgcatcagctcccacgccgtcagccgggatccctggagaacgggtcttgtttcacatgcgtagatatgaaggccgaggtctttttgtttcgctaagtaaaagggagcaagcgccgtaccgtaccggcttgtagcaatcgagcccgcattgcagatggtcatgatctggtcgccttttttaaaaaggtgcagcgcattttggccgatcattcggcaggtttcttcatcctcaatctgaatttgaatagcttcatgaacgagcgttgttttcgcttcattgattgagattgcatccctgatggaatccgtcagtctgtcaagcgcccacgcgaggttgacggcagtgggcctcgaactgtttaaatacgctttgacatccgcgaactgacgtcggaaatctgaaaggtcgcgggcttcaaatgacttggcggagagcgcgagtccgaatgccgcggttataccgatggccggggcgccccttactttcagcgtgacaatcgcgtcgaatacatcttcctttgtttcaagttccacatactcagtgacgtcgggaagtttttgctgatttaaaatgcggatgtaggtttctttccattccacggaacgggggatggcaaattcattggtcatgctgcatcattcctttacacggagcttaaattggtccagaacttcggtgatatgcttcagttcttttctgttttcgatataataggcgccgatctcaagcgccagcttcttccgttcgattcgtttgtcaaacggagtgatttcatctaagtcagccacatgggcgagtccgatcgtgcgccggatcaattcgcatcccgcaaaaccgaccgcttcctcaaacgcgtttttcagtgtgtcttccagcaggtgtctgtgggaaggcaggcagtctttctcccatgcttcactgaatgttttcacaaatgtatcccatacggcggcagtatggtcatataacggctgtctgtcgtcaccgtcgcggctgagggcgtttaacagcagattggcgataaattggccgatgtcaaacccgatcggtccgaagaaagcaaactcgggatcaatcacctttgtttcatgttcatcggcgaagatgcttcccgtgtgcagatcgccgtgaaccaatgtttccgcggaattcagaaagatggctttcaattcgtcagcgccttctttcagccgggaattgttccaaactttttctgcgtacgggcgcagctcctcttcaaaatcgttggtctcatggtcgagaaacggttctgtaaacacaagcctttctgtaatattgcaaagctcaggatttgtaaactgctttgcgagctgctgctttactttcgcatcaagcgcataatcggatgagtaaaaaagcgttttccctaaaaattcaccgatatgaaccgataagttcggataatgctgcccttccagcagcccttttcttgaaatctgcaaatgtgagaggtcttccattaccgtgacggccatttcagtatcggaatagtaaacggccggaacgaggtgcggcacgtgttcgccctggcggatgagggcgctgctttcgattctcgcccgatcaattgtaagcggccagctttcaccgacgactttcgcgtaaggaatcgcctgtttgataatcagtcctttttggttttctttatcgtaaacatgaaagacgtaatttaaattgccgtcgccgatttcacggcatgtcagagtgcttttgctttggaataagccgagcttgacggctaacgcggcggcggagctttctgttaattgttcataaagacttgttttagttgctgacatggatttaccctccaattatgtagtggcagtaagagatcgtgacggagaatacgcccgaaaaaaagcctccttctctgaaagagaaggaggctgaaacagtgcagtccgcctcttatctctcagataacatctgatggaattagcaccgtgccttatgagacaatcgtctcggcgcaaaatgtacgcgccccatttcacaatggaattacggtcggttgctgttggggtcaaaaggccaattccctcgcccaactctcgataagagaaaatatattgatttgtatcacaattcggattaatcagttgatgaaaatattagcaggtgccggatattcttgtcaacatttttttgaaaattaatataaatcacgccgcaagtcttggaaaaccggaatggttccgcggacggccgcgctttctgacacatcgatttccgcccggactgcgccttccgtccggtctccttcggctaaaatccggccccacgggtcaataatcaggctgtggccggcaaattcattatcgggattggaccccgtgcagttagaggctgcgacaaaacattggttttcaattgctctggcgataagcaggcttcgccaatgatcaaggcggggcagaggccattccgcagagataaacaggacattcgcgccctgggacgtatgctttctgatccattcggggaaacggatatcatagcagatcagcccggcgcacttgacaccgtcgagctcaaaggaaccgtcgctgtttcccgctgacaagtaaaggtgttcatccatcagctgaaacagatgggctttctgataccgcttcacgatctgtccgctgttatcggcgatgtacatggtgttatagacattttcgccttctttgaccgcaaaagatccggcaacgaggtgtacgttgtatgtttttgccgtttctttaagccattgttccgaaactttgccgttttcatccgccagctggtctagccgtgtgagatcatagccggtcgtccacaactcaggaagcacgattacatccgcatggcggctttcttgctcaatcaaagattccgcttttttaaaattttctgaaggatttccgtatgaaatatcaaattgcaaacaggaaacggtccatttcattttttaacacctcaagtttctctttactttttttatttaaccatatatgatgatggactatcatttcaagacatttttagaaggtgaaaaatatgaactttgaaatctcagatgtactcaaacagctgccggaacaatttttcgcatcattggtgcaaaaagtaaatcaaaagctgaaagaaggcagagacgtcatcaatttagggcagggaaaccctgatcagccgacgcctcagcatatcgttgaagaaatgaagcgcgccgtcgaaaggccggaaaatcataaatactcatcattccggggcgcttacagcttcaaaaaagcagccgctgcattttatgaaagggagtacggggtcacgcttgatccggacacggaagtcgccgtgctgttcggaggcaaggcgggacttgttgagcttccgcaatgtcttttaaacccgggagataccattctggtgcctgatcccggatatcctgattactggtcgggcgtcgcccttgcgaaagcgaaaatggaaatgatgccgctgacggaagaaagagggtttctccctgattacagcgtaattcctgaaaaggtgcggagcgaggcgaagctgctgtatctcaattatccgaataatccgaccggcgctgtggcgacagaggcgttttttgaggagacggtcggttttgcggaacaaaacggtatttgtgtcgttcacgatttcgcgtacggagccgtcggctttgacgggcataaaccgctgagctttttgcagacggaaggcgcaaaggagacgggaatcgaagtctataccttgtccaaaacgtataatatggcgggctggcgggtcggatttgccgtcggaaacgcttctgtcatcgaagcgatcaatctttatcaggatcatatgtttgtcagcctgtttcccgcggcgcagcaggcggcggcagccgctcttttagaggatcaggcatgcgtcgcagcgcaaaatgacagatatgaatcgaggcgcaatgcatggattgaagcctgccgcggtatcggctgggatgtgacggctccggctggctccttttttgcatggctccctgtgcccgacggttatacgtcacagtcgttttcagatctgctgctcgagaaagcggatgtcgccgtcgctgccggaaacgggttcggaaaatggggggaaggctatataagagtcggtcttctgacaagtgaagaaagacttaaagaagctgcggaacggatcgggaaactgaatcttttcacccgaaaaagcattgacatatctggataacaatgcgataattcaaaatactttataaaatcattattcttatcaagagcaggcagagggacgagcccgatgaagcccggcaaccgactgataaagcacggtgctaattcttgcagcaggagctgagagataagattcggacataacacgaagcctctttctgctcatacggaagaggtttttttatgttttgtgaaagaaagagaggcgttcacgcatgagcgaagtattggcaacatatcttctgacagacacaacggacagtgaaaagcgggcggaacagattgcggcggggctgacggtaggctcctggactgacctgcccctggtgaagcaggaacagctcagaaaacataaaggccgggtcgtaaaagttgaggagaaagaaggaacctcagaaaacgaaacacaatccgtcatcactatcgcctatcccgaggcgaacttttcaagagatattccggccgtcctgacgacggtattcggaaagctgtcattggacggaaaaataaaattgactgatcttgaattttccgaagggtttaaacgctcccttcccgggccgaaattcggtatatacggcatccgcaaactgctgggcgaatttgaaagaccgcttctgatgagcatatttaaaggcgtgatcggacggaatctcgccgacattaaagaacagctcagacagcaggcgctcggaggcgtggatctgattaaagatgacgaaattttctttgaaaatgaactggctccgtttgaaacccgcattatcgaaggaaaacaagtcctgaaggaaacccgggaggagacggggcataaaacgctgtatgccgtaaaccttacgggaaggaccgctgaactgcgggataaagcgaggcgcgcggcagaactcggggcggacgcgcttttattgaatgtgttcgcttacggtttagatgtgatgcagagccttgcagaagacagggaaatcccgcttccgatcatggcgcatccggcagtcagcggcgcgttcacttcatctcccgtttacggcttgtcgcatgcgcttttgctcggcaagctgaaccgctattgcggcgctgatttcagtttatttccgtcaccttacggatccgttgctcttccgaaggagtccgcgcttgcaatccatgatgaatgtgtaaaagacgatgtctttcatccgtcgtttgccgtcccgtcggcaggcattcatcccggtatggtgccattgttgatgcgcgatttcggcatcgatcacatcatcaatgccggcggaggcattcacggccatccgaaaggagccgagggcggcggaagagcgttccgcgccatcattgatgcggtgcttgaagcgcagccgattgaagaaaaagccgcgtcgtgcaaagatcttcagctcgcattagacaaatggggaagggtggaagccgtatgacccgcacaccgctgattatttgtgatttcgacggaacggtcaccatgaacgacaacattgtcagcatgatgaaagaattcgcgccccctgagtggattgaattaaaagacggtgttctgtctaaaagcctatcaatccaagaaggagtcggccggatgttcggactgctgccgagcagcttaaaagaagaactgacagactttattctgaaggatgcgaaaatacgggacggctttttggattttgtctcgtttgtccggtcaaacggcctcccgttttatatcgtaagcggaggaatggacttttttgtgcatccgcttttggaagggatcgtagaaaaggagcggattttctgcaatcatgcatcctttgacaatgaatatattcatatagactggccgcacgcctgtgacggaggctgcaccaatcaatgcggctgctgcaaaccgtcagtcatccggaagctgtccgatcagcagaaatttctcattatgatcggtgattcggtcacggatgttgaggctgcaaagttatccgatatgtgttttgcgagagattatcttttgactgaatgcaaagaactcggcctccggcatctgccttttcaagattttcatgaggtgaaaacaggcattgaaaacatcggggaggtgcaggcgtggctgtaaaagaagaacgctggcgcgaacttgccgaggtaaagcgcgagctggccgaaagagactggttcccggcaacgagcgggaatctttccatcaaagtatccgacgcgccgctgactttcctcgttacggcgagcggaaaagacaaacgaaaagaaacagacgaagattttctcttaatcgatgagaacgggaagcccgctgagaccggccattctttaaaaccttcagcggaaacgcttctccatacttacttataccaaaagacagaagccggctgctgtctgcatgtccataccgttaataataatgtcatctcagagctttacggggatgaaaaacaaatcacgtttcaggggcaggagatgattaaggcgctcggattatgggaggaaaacgcgtccgtgaccgttccgatcattgacaacccggcgcacatcccggcattggccgaaaacttcgcgcaccatgcggacgccggctcaggcgcggtgttaatccgtaatcacggcattacggcatgggggcggaccgcatttgaagcgaaaagggtgctggaagcctatgaatttttattcagctgccacctcaagcttctgtcactgcggccgcagcttgtaaaataaaaggaggaacggaaaatggcgaccatcagaatacatgacgaaaagaatacgctcattgaaaatcaggaagaagtagcgcgctttttagacgaacaagaggtgatctatgagcagtggaacattgaaaaacttccgtctgagctttcggagaaatacaatctgacagaagatgaaaaagaacggattctcgcggcgtttgacacggagattcaggacatttcagcccggcgcggatatcagtctcaggatgtcatttctttatcagataccacgccgaatcttgatgaattattaaaaaatttccaaagagaacatcaccacacggatgatgaagtccgctttatcgtcagcggacacggcatcttcgtcattcaaggcaaagacggcacatttttcgacgtccgtttaaatccgggcgatttgatttcagttccggagaacatccgccactactttacgcttcaggaagaccgccgggtcgtcgcaatccgaattttcgtgacgactgagggctgggtgccgatttacgaaaatgaaagtgtgcaaaactgatagacgcccgaacctctcatgcccccgccggtatgagaggttttttattgtaatataaagtcagctgtggctgttttttaaatcttgaatatgccgcattctgtttatatcattacctgaatgggtattattctcgtattcatgctaaagattccaatatgaaatgaaaaaataagttatttagtaaaaaaatgtttacaaataaagtataatctgtaataatgctcaataacccaatcaaacttgtttcctattcttttagcggtgaggggtgaagtgaatgggcagttattctgaacaagaaaaattgcttgtatctattgataaaaaaagaaaaatgatgatagatgcggctaacagacaagggtttaccggatatgacacgatcaggcacagccaggaactggactgtctgatgaacgcgtatcagcagctggtaaaccgtgatcgcacacatcaccaaggaatacagggccttgtgaagaaaataggcttgttctcccgcggtgacgtcatgcctgcatatgaagcaaacaaatgattgatgataaaacagataacgaagactgaatgcgcttcctgatcaagcgccgcatccgaaagatgaccgcgtacagtcagcagatttttccgctggcacggctcacgaagcgcctcgtactatctgccggctatgatgccgttcctctggtatatcctcttacacatattcttctttaaataaaaaacaccccgacccagggtgtttttttcatcgtgaagcggcaggaagggtaatggtgacctctgtgcccttatcgacttcgctttgaatgtcaatcgaaccgccgtacatcagcatgattcgtttacatacgacaaggccgaggccggtgcctttttcctttgacgttacaaacggaagaaaaatgtgttcaagcatatcttcagaaatgcccattccgttgtcggccaccttaatgactgctttatggtcgcgggcttctaaatagatggacagccggccgccttcctgcatggattccagcgcgttttttgcgacatttaaaatcacctgtttaatatggtctttcgtgcagttgaccttgagcggccgattgacgagaatctccacattcacttccacattatacagattcccttcagaataaataatcggcataatctcatcaagaatatcctgcagcgagttcacttccaaccgttcagcagtgggtttaccgagcactaaaaactcactgacaatctgattgatccgtttaatctcctgctcaataattgagaaatacagctgatcttcctccgatttgtattttttctgcaaaagctgaatgaagccgctgatccctgtaagcgggttgcggatttcatgggcggtgctggcggcaagcgttccgatcagctccaatttctgcgcttcattttgagcgcgctccagctgggtcttgcgcttaagcagataatattggacgaggatgaacagaatattcagcagcacggcaatactggacatcggcagcagtacgcttttggtcagctcgttcagctcaaccggtttcggataaacattgatattccaattaatatcatccagatagccgctgaccggtttcaccccttctgattgatcagcccgtccgctggcaaatatcactttattctgattggttgccttgacataaacgtcagggctcagcatattgatcatatttctcaaataatcgacttgaatggcggctactaaataatccgtgacttcccgttttgcgtctaacaccggcacgcagatcgtgaagatgcgctggcctgtaattctgctggagtagtcatttgtgataaccgtttttttcgtctttttcgccttcgtaaaatacggtcggtcggccaaattcacctttgatttcagatcagtcgtgcttgcgatgacatcacctttggaattcagcatatacagaccgctgaatctgggttcatcctcaaaagcctgatcgagaatatcaatgatcttttcttcattgacaggcttatcgacagcgatcgcaagtgttgtcatccgggcttttgtttcaccgattaaataattgagcttattgcggtgaaggttgagcatcatactggcttcctgtatgtgtttatcggctattttctgcttttctttttcataaatgaaaaagctgataataagtgccgggatgatcaccaatatgagataaagtttgatctttccccgggcacctttaaatgtattcactctgcatcgctccaacattacacttgaatagaggtattatatcatttttatacttctttaataagaaaaaataaccaaaatgatagaaaaacaaattattttattaaggccagacaaaaagaagagaaattttggaaacatttttgttgacatttttcattttgtttattaatgtttctctgtaacggtttcttttgtaaaaggatgattgaatgtatgacggataaaacagaaaactcattgaaattatttattgtactgtcacgtgcgtaccgatctattaacgaccatatgaataaacatattcataagcacggtctgaacccgacggaatttgcggtgcttgagctgctgtaccacaaaggcaaccagccgcttcagcagatcggcgacaaaattttattagcgagcggaagtattacatatgttgttgacaaattagagaaaaaagaacttctcatcagaaaagcctcgccgactgacagaagagtgactttcgcacaaatttccgaaaagggaatccgtcttttggacgatattttccctgatcatgctgaagaaattaaagaaatgatcagtgtgctgagtgatgaagagatagaaatgtgtacggaaatgctgaaaagagtggggttaaacgctaaacattttcatcagaaataaaaaaggaagccgtttgaaaggcttccttttttatattactgattttggtcagtcgcggcgtttctaggctgtatcaatacctcgacgcgcctgtttttgctgcgcccttcagcggttttgttcgacacggccggtttatactctccgaaacctttggcgctgaatacttttgcgtcaagtttcgggttttccgtgagaatagccatgaagttgacggcccgcatgacgcttaaatgccagttagattgatattgtgagtttttaatcggcacattgtccgtatgtccgctgatgataatattcctcggcggattcagcacaaggagattcgagatttccttggcaagcggaatatcttcctgacggatgtccgcccgtccggaatcaaaaaagatactgtctttaatggtaattaagagtccttctttagtcagctttgtttccagctgagtttcaagctttttgttttttataaattgattgacttgcttttgcacgccttcaagttcttcgcggtcggctgcttctctttctttctttttctgttctttatctttttccttgtctttttttaactgatcaacgccgtctttttcgttttcaggaggggtgacgcttgaatattcaagaacacccgtgcctccggtaaacacggcgttaaatgatttagacagcatttggaatttcgccgcatcgaccgagctcatggcgaacaatacaatgaacagagccaaaagaagggtgagcaaatccgcgtacgggatcagccaagactcatccacatgctcgtcatcatgcttcttcttcttttttctcgccattgtttgcctctccttcttgttcagcgacttttgcgcgttcattcgcaggaagatacatgagaagtttttgttcgatcactttcggggcctgtccttcaagcactgacagaacgccttcgatcatgatttcacgcagtttgacttcctgctttgatttgcgtttcagtttgttggcgaagggatgccatagtacatatcctgtgaaaatcccgagaagggtggcgacaaacgccgcactgatggcatgtccgagcgcctcggtattgttcatgttggaaagagcggcgataaggccgatgaccgcacccaaaacgccgagtgtcggcgcatatgtgccggcttgtgtaaagatggctgcgccggcctggtgtctgtcttccatcgcttcaacttcttcagtcataatatctctgataaattctgcgctttgtccgtcaaccgccatgctcaggccgttttttaaaaatgcgtcatccacgtcttcaatgcttgcttccaatgcgagcagaccttcacgtctggcgatttgcgcccattgagagaacataggaattagttgcgcaattgtcagctgtttgttttctttaaacagcactttaaaaagggcaggcacttttttgatttcttttccggggaatgcgatgatcaccgcagaaatcgtaccgaacaaaataatcagaatagctgccgggttagcgagtgcgcttaagctgacccctttcagcaccatgcccacgcttaaagcaatcactgcgaggatgataccgataatcgatgttttatccatagttttcaccaaatcctttatactagctttctatggttaatatcggtggcagtgcatggaactttagggtgattgaaaaattgttcccgaattcttcacagtttctcccttccggcatggagaaagaaacaaaaaagcagctccccgcgaggagggaaccgcttttttcttattgtgcccggactttgatgccgtcctcttccattacgacatggaaggctttgatttcgttgtcatccaatagaagatctgtcatttcgtcctcgatcaattcttggatggttcttctgagcgggcgtgctccgaaagcggggtggtagccgatttcagcgattttttccttcgcatcatcggtgacgctcaggctgatgccgcgctcttttaatgtgtcttcaagctctgtgagaagcaggctgacgattttcacgagatgttcttttttcagggattggaattcaataatgctgtcaaaccggtttaaaaactccggtttgaagaacgcgctcagtgaatcaatcagcgtttgttcttccatgacgctctcttcagattggaatccgactttcacctgtttttcgccggttccagcgttgcttgtcataatcaaaacggtatctttaaagctgaccgttctgccctggctgtctgtcagacggccgtcctccataatctgcagaaacatatgctggacatcagggtgggctttttcaatctcatcgagcagcacgatgctgtacggattgcggcgcactttttccgttaattgaccggcttcatcgtgtccgacatatcccggcggtgaaccgataatttttgatacggcgtgtttttccatgtattcactcatatcgagacggataatggaatcttttgtaccgaacagttcatctgcgagtgtctttgataactcggtttttccgactccggtcggtccgacaaagaggaaggagccgacaggtctgtttttggattttaaaccggcgcggcttcgtctgactgctttcgccacttttttcacggctttttcctgaccgatgacacgctgatgaagatgctcttcaagttccttcattttgacttgttcatcagcctggagttttccgaccggaatgcctgttttttgttcaatgatggcttgaatatgctccgcgccgatttcaggtgaagaggccggtgtttcatgcgccagctgcttttccaaagctgcttcttcatcacgcagtttcgcggcaagctcataattttcttcctgaagcgcttttgttttctccgcgtcaattgcattgagtctctcagccgcatcttcttcatttacggtatcaagttccaggttcgccttagagccggcttcatctaataagtcgatcgctttatccggcaggtggcggtcctgaatgtaacgggatgaaagcgtaacacaggcgtttatcgcttcattgctgaatgtgacgccgtggtatttctcgtatttatctttaatgccttccagaatgctgatggcttgttctattgtaggctcgtgaaccatgacaggctggaagcgtctttcaagcgccgcatctttttcaatctggcggtactctttcagcgttgtcgccccgatgacctgcagctcgcctctggcaagcgccggtttcaggatgttcccggcatccattgatccctcggcagagccggcacctacaagaaggtgaatctcatcaatgaacaagatgacatttttccgttcttttaattcgttcattaattgtttcattctttcttcaaactggcctctgatccctgtattggcgacgagagaagcgacgtcaagcaggtaaagctctttgtttttcaacttgttcggcacatcgccttcagcgattttaagcgcgaggccttctgcaatagccgttttaccgacgcccggctcaccgatcagcaccggattgtttttattccggcggttcaaaatttcaattacgcgcgccacttcattatcgcggccgatcacagggtcaatcagacctgcttttgcgccgtttgtgacgttttgagcgagctcgtcaagcaggcctttttcagggccggcctgctgtttattttgattgggagcgaaaccttgctcaaacgggaatccgaatgattgcggccccatgctcatagacggttttcgggttaattctgtataacatgtttcacataaaacgaattgtttttgaatggaattgacttgcatgttcaggcgaatcgtcgcctcgtttttctgacaatgttgacaacgcatttgccaaaacctcctcgaaaaatatttgatcatctttgaccaaatgggttagaaaataaggtcgaaactttgaccttctttgattattagtatactctgaccttctttgactttcaagtattttgtttcaaaccccgaaaaataaatgtttacagcatgataagtgatattcgtgaggtttgattatttttgaccaatatagtcggaaaggaaatgaaatgctttgacctttcttgatgaagagtatacgccggccctttttttctttcaatatttttgcttagaggagagagctgaatctgttttttccggggaaggacgatttgttcgtcttttcgggagacttgtctcataagcatatataaaggcctggacaaatctgcgtttagccggagggtgaaatgggacaaacaaaaggttctgcaagtcagcttgcatttgtatacgtaggcacggttgtaggagccggttttgccacgggacgggaaatcgttgagttttttctgaagtttggctggatcggtctgttcggtatcgtggtaagcggtctgatgtttacatatttaggcgccaaaatcatgattatttccaaacggattcatgcagcatcttatcaggaattgaacacatatttattcggccagtccatcggccgcgccgtgaacatgtttatgatgtttatattgctgggagtgacctctgtcatgctgtccggagccggagcgctgtttcatgaacagcttggctggcccgcacaagcggggatcctactgacgatcgtactgagttttgccgtcatgacaagcggtgttaaaggtgtgttcggcgtcaatatattggtggtgccgcttttaatttctttctcttttatcgtgacagctgattcatttgtatttacaagcacgagaaacgcggacgaatgggtatggcctgacaagtggaactggcttttgtccgccgtctcttacggcgcgttaaatttatcgctcgcccaagccgtccttgtgccgcttgcgaacgaaatgtcttcagagaaggtgatcagaaggggagcttatataggcggcgttctgttgacactggtgcttgccgcgagctttttatcattatcggtgctgccggatgtgctggagtttgacattccgatggctcaagttgtctattcgtattcgcgttcgcttcatatcatttatttgtttattattttcggggaagtgtttacgtcggttatcggcaatttatacggattggaaaaacaattaaacagttttcttcatataaaaagtacatatatttacggcggcattttggcgtttgctttcattatcagccaaatcggttacggacagctgatttccaccgtttatccggtgtttgggtatgtgagcctcgcttttatgggcgcattgatttgcaaaaaaatcccgaaagaaaaataaggaaaatgtctgtatattttgggaattcccttcttttttcctgccatttctgtataatgaattgggaaatgatggggaggagtaagagatgaaggatcgacgtgtattattgggatttatttttatttgtatcggcattacgttttttttacagaaggcgggagttatacatatatccgcaggttcggcgtggccgtttcttttcattataatgtccgcagggtttcacgccggatttatttttgcgaaaaaaacgcctgaacaggcgggactgctcgttcccggcggtatgtttcttgtgctgggctgcctgttttgttttgagaccgcaacgggatggacgtattcaggcatgacgtggcctgtttatatatgggcgcctgctctcggtctgtttgagctgtggtatttcggcgggagaaagatcggcgtattgattcctgcttttatcctgacagccgcgggagcactatgctttgccggtatgctgatgacggggctgtggccgcttttgatcatcgcagccgcgcttttgtttcacgccgctgcctttatgcaaccgaaaaaaagatcgggccttcttattccgggcggcattttgcttgtgacgggcggcttgttatggtttgaaacgctgacggattggacatacgcaacgatgacatcgcctgtttacctctttgccgttgcattcgggctgtttgaagcctggctgttcggcagaaggcaaagagggcttttgactgctgcggcggttctgtgcgccgcgggcattttcggcatattcaccaatgcaaatgaagtcatcagcgaacgcggctggcccgctctcattctgttgctgggcgccgcttttcacattccgattttcggcccgaaacctgtcaaaaacgcggggcttctcgtaccgggcggcatcttattgatcacggggatcttgtttgtctttgaaacggcaaccaattggttctactccgatgtgacatggcctgtttacctgttggcaacggcattcggtttatttgagctgtggctgttcggcgggaaacagaaggcgctgctcattccggttgcagtgctgaccttgacagcactttgctttatgatgacgtatcagccgatcattccggtttctgttttctggcctgctttatttgttctgatcgggattgcgctgatggcatttccggggaagaaacgcggggcttaaacccgcttttgcagcctgacacagggttcaggctgtttttttattgtcacgggaaacaacattatggtatgatagcaaaagtgaaaaaagaagaaaatccgtattgatgcgggagaggttctagctacaccctctataaaaaactaaggacgagctgtatccttggatacggtttttttatgttttttagggcgccttctccgaaaaaggcgctttttttatggaatgatagataagggagagaaagacatgaaaaaagaaaaagcggttgtggtgttcagcggaggccaagacagcacgacttgtttattatgggctttgcaaaactttgaagaagtggaaaccgttacattccattataatcagcgtcaccaagaagaaatcgatgtggcaaaatcgattgccgaaaagctcggtgtcaaaaaccacttgcttgatatgtctcttttaaatcagcttgcgccgaatgcgctgacaagagatgatatcgaaattgaagcgaaggacggggaattgccgacaacctttgtaccgggacgcaaccttgtatttttatcctttgcatcgattcttgcatatcaaatcggcgcgcgccacattattaccggtgtttgcgagactgatttcagcggctacccggactgccgtgacgagtttgtcaaatcctgcaacgtcaccgtcaacttggcgatggaaaagccgttcgtcattcatacgccccttatgtggctgaacaaagcagaaacgtggaaacttgcggatgagctcggcgcgcttgattttgtaaagaataacacactgacttgctataacggcatcattgcggacggatgcggcgaatgcccggcatgcctgctccgcaataaaggatatgatgaatatatgaaaatgaaaggagagcggaactaattgctttctcaaatttacccgcaggttcagcatccttattcgtttgagttgaataaggacatgcacatttcagccgcgcactttattccccgcgaaagcgccggagcgtgcagcagagtccacgggcacacgtatacagtaaatattacagttgcgggggatgaactggacgattcaggctttctcgtgaatttcagcgtgctgaagaaattggtgcacggcgcttatgaccatacattgctgaatgaccatgaggaattttctgatgatgacagatattcactgccgacgaccgaggtcgtagccaaaacgatttatgataaggtgcagtcctacctcgaaacactggagaatcagccggtctgcgtgcaggtttttgtcagggaaaccccgacaagctattgcgtataccgcccgaaaaaaggtgataggaatggctaaaggaattccggtattagaaattttcggaccgacgatacaaggggagggcatggttatcggccagaaaaccatgttcgtccgcacggcgggctgtgactactcctgcagctggtgcgactccgcttttacatgggacggatcagccaaaaaagatatccgctggatgacggcggaagacatttaccgcgagctgagagaaatcggcggagacgccttttctcatgtcaccatctcaggaggaaacccggcgctgttaaagcagcttgacgcgctgattctgctgctgaaagagcacggggtgcgcgccgctttagaaacgcagggaacagtctatcaggattggttcacaatgattaacgacctgacgatttcaccgaagccgccaagttcggggatgacaaccgattttgcaaagctcgatcatattatgtcttcgcttgatgcggcagaaaggcttaacgcggtcagcttaaaggtcgtcatttttaatgatgaagatctgcaattcgcgaaaaccgtgcacaagcggtatccgaatatcccgttttatcttcaggtcggaaacgataacgtccatacgacggacgaccgggcattgatcgcacatctgctcggaaaatacgaaacactcgttgataaggtttcagccgattcggatctgaatctcgtcagagtcctgcctcagctgcatacgctgctttggggcaataaacggggagtttaatagaaagggagatttatatgacaagaaaagaatcagaattagaaggagttacgctcctggggaatcaagggacaaactatttatttgaatatgcgccggaggttttggaatcatttccgaataaacacgtgaaccgtgattatttcgttaaattcaactgcccggaatttacgtcgctttgcccgaaaacgggacagccggattttgcaaccatctacatcagctatattccggatgaaaaaatggtggaaagcaaatcgttaaagctgtatcttttcagcttccgcaaccacggagatttccacgaggactgcatgaacatcatcatgaatgacttgatcgaattaatggacccccgctacattgaagtatggggcaaattcacgccaagaggcggaatctccattgacccgtatacaaactacggcagaccgggaacaaaatacgaaaaaatggccgaacatcggatgatgaatcatgatatgtatccggagacgattgataatcgttaatttcagacggagtacggactcggactataacctaaatacccccgccttttaagcgggggtatttttcgtctctgccacgcagccaaaaaggtgcatgatatttgcacagaacttctataaggaaaagagagatcatttggagaaaagaaaaagacgagtaaacccggggggagtgtactcgccgcttcaatacgtgacgggtgctggatggcagctcgtctgtttcattataaaatagggaacgtatgtttgtaaaggactgcgctgttttttcttattcggagcggatcaattgtaaaggaatggccagcatggtagcatgtcctgtaaaaagaaggagtgttcgttatggagccgttagagttaaacggtgtaaggctgaaaatgtatgattgtaaagaaagtgcgggtaaaaacggccgtatgatttcattcgtattgaaggtgacctctgaaacgtatcatgatattgccgtccttttgtatgaaaaaacatttgacatcaaggcgcccgagcgtgggcttgaattccgcggtaaaataaccaactactatacatccgtcacaaatctttacaataaagatgagaccgatgatttttttgtggaaatgaccgagatctgaattcatttgaaaaagctgccgggcggcagcttttgtgcgggatatgtaaatggttcggattgttcgggggtttaataggagtctctgatgattttataattcttatggttgacgacagtgagggaatctaattcaaggtcacgataattatccatgatggttacatcaacgatgacggagttttcatttactttttcaacaataccggttaatccgtttttaaattcaatgacgtttccaaccttagcaattttcacgagcttcctctcctttatcataaatcctgtttgaaaatattttgcagtattttctttaagaagtaaagcgatatgggtatcagcccgctcaatcattgtcccggcgggggaaagatggtatattgtttttcgggaaaaagccgagaaaaggaggctgtattcgttgctgcctgaggaaatttcagaacgtatcaaccaaatgcgcatcggtgaaatcaaagaattcagggtgcagaaagaacattttcttgcatttcgagcggttttgtcgaagcaggaagattttaagcatttccgcggtattgcccagcagggcggagatgttatcttccagtatttagaacagccaagaagctgacggctcctcgcacttgaggagtctttttttgttttcgctgcttatttcatctggctgtaacagatgtaaacaaaatgtaaaatccctccgatggatacttttactgctatttggttaatgttgtgaaaatgacggctgttttcctgccaataacaaggctgttaacaaacttcttccatcataaaagctgattgggagcattggaaaatctttaaccgtgaatttgcgtacagctcttgttaaggtagtgaagtatttaaggaggaaatcgtatgacgacaaaatttgctgccttggctgtcttttttctatgttttatgcctgcatcaaaaattgaacatacagaagctctgtttacttttgcgaagaagccaaagcaagaacccagcacactggttgctgatttaaataaaaaaagcccggttccgaagctctcagaaacggatcataagcactctatccaaccgataaagctgtcatctcaccaagagaagaaagcaaaaccggacgagacggcttatcagccgccgaaaaaaacgtattcccgcgctgacagacagctcctgtcacgtctcgttcacgcagaagcgaaaggtgaatcttataaagggaaggttgcggtagccagcgtagtgctgaaccgtactgaaaaaaacggtttcccggataccattcggggcgtgatctatcaaaggaatgcatttgaaccggtagcaaacggaagcattaatcaaaagccggataaggattccatcgccgccgcaaatgaggcgctagaccatccgggcagagaaacgaacgcgttgtttttctacaatccgaaaacggcatctgaccactggatccgttcccgaaaaattatcgaacggatcggcagacacgtatttgcgatgtaagaagcatagcgggataaaaaatatccccgctatgcttttttcaattttgagaaatcgaaaatattttcagaacttgtctcatatgatgatggaagaacgtgagacaaggagagacaccatgaatcgatttgtgaaagggatcattcttttatccatcgccgcctttttcgcggaatgtctggaatttgtcgtgaatatgatactggcgcgggagcttggcgagcatgggatggggctttacatgagcattctgcccaccatttttttaattatcgtgatcgccagtctggagcttccgatctctatttcaaaattcatcgcggaatccaatcagaagctgcatgaaagcatgcttcggcatgccttcagaatgaccgccgtttttaccgcgttttcaaccgcggccgcaagcatcgcgctgccgttcattcctgtattcgatacgtatcacccgtttattaaagggattgtcatcgggctgattccagtcgtcgcttttacatccatcgccagaggttattttatgggtgtgcagcaaatgggaaaaatcgcggttgcgaatgtcttgaaaaaaatcattcaagtgctttgtctgtttatcttttttcaatggtactcttttgaaattgatatggccgtgcttatttcgttatttgtgctggtcgcaagcgatgttgtggtgttcgtttatctgtatacgcagtttattttggcgcggagggcgctttccggccatcagcacattcatcttcgcgggaaagacgtgcggaaacgcctcctggccgtatccatcccgacaacgggacttcgtatatttcatgcggtgacaaacgcaattgaacccttcttggttaaaggagcgctgctggcgtccggggcagccgggaccgccgcgattgatcaatacggaatgcttgccggtgtagcgatgacaatcggttcgtttcccgcatttatcgcccattcgctgatggtcgttatgattcccagcatttcagaagcgtatgcgctgtcccaatatgatattgtgctgaaacggctgagacaagcgatttttattacattcggctacggcattccggcggtctgggtcatgtttcagttcgcgggcccgctgacccatttgttttttcagtctccggaagcgcagtattatttgcagcttttgtggccgttttttctttttcatctgtttgtgatgccgcttcaagcctgtctgatcggcatcggccacgtgaaaacggcgttttatcataacgtatggagcagcattgtaggtctttcaatgatgtatgtgctcggttctatgccggaattgcaaatgctcggcattatactcggtatgaataccggcatgattcttctgacaagtttacattacgtgacgatctgcaaagacctcggtgtctccgtgtttttgacgggcggcggaagaacagctccccggatcgaaagctgaaaaggctgatacatttcaataaggaagggcaagctatccgaaacgcgtgaaaggaagatcatatgcataaaaaccgtctaattgtatgtgcagtccttttgatagctgccgccgtttggatgcctgaagcaaaagcctcatcagaaaaacaggcagttcccgccgtgtttctgatgaagacgattgaaggagacgaaatatcgattccgaataaagggcagaaaacgattttgcatttttggacatcgtggtgtccgccgtgcaaaaaagaactgccgcaattccaaacctattttgaacagcatcagtctgatgatgtaagccttgtaacggtaaatttgatgaatgccgagcgaaataaaaataccgttcaaaactttgtcactcagcaccatctcacattcccgattgttcttgacacgaaaggcgagcttatgaaggaatacgatgtcatgacgattcccacgtcatttctgctgaatgaaaaaggagaaatcgaaaaaaagatcgtcggtccgatgaccgcctcacaattaaaagaatggtcagagaaataaaaaggtgcgggaggaattcctcccgcaccttttttgcatataatgaacagctgaagaaacactaatgataattattatcataaagaaattaaaacaattataattgaaatcttccgccggcatgctataataaagaaaacactgcgataacactgtgaaaatgctgcctgtcaggcggctgttttacttttatcagggaattgaagatgatttgcgttctcaattagagaggagaattcataatgaatgaacaagtgatgacacaaacccattcacaacagcagaagatacaagaagagcgggccggaaaaaggtggctccagcatgcagaactcattgcggcgctcgtatccggcgtccttattcttgcggcctggttttttaccgaaacaaaaggcctgtccgtcactttgtatatccttgccttcctgatcgggggatttgcaaaagcaaaagagggaattgaggataccattgagacgaaggcgttaaatgtggaactgctgatgatatttgcggctgtcggctccgccctgatcggttattgggcggaaggcgcagttcttatctttattttttcgttaagcggcgcgctcgaaacatatacgatgaataaaagcagccgtgatttaacatccttgatgaaactggaaccggaggaagcgaccctgcttgcggacggacgggaaaagcgggtgccggctgctgaacttaagatcggtgacatgatcgtcattaagccgggcgaacgcgtagcggcagacgggattattgagtctggcgtgacgagcctcgatgaatcggcgctgacgggtgaagcgatgccggcggaaaaaacagcaggagattctgtgtttacaggaacggtaaacggaaacggctccttaacggtccgtgtgacgaaaacaaatgaacagtctttattcagaaaaatcatccggctggtggaatcagcccaaaacagcgtgtcaccggctcaggcatttattgagcgattcgaaagtgtctatgtcaaaggcgtgctgttagccgtggctgtgcttttattcgttcctcatttcgctttaggctggagctggagtgaaaccttttaccgggcgatggtgtttatggtggtcgcctccccgtgcgcgcttgttgcttctattatgcccgctgcgctttcccttatctcaaatggggcccgcaacggattattggttaaaggaagtgtgtttttagagcagctgggaagcgtacggatgatcgcatttgacaaaaccggcacggtcacaaagggacagccggcagtcgcggcatttcaagcagcggaaaatgtgagtgaagatgagatcatgcaggcggtatatgcgatagaaaagcaatcaagccacccgcttgcaaaagcgatagctgaatttgccgaaagccggggcgccgcgcccgcaggccatctatcgattgacgagacgtccggattcggtgttcaggctgaaatagaaggcgtcaaatggatggtcggaaaagcgggatttgcaggtgaacatgcggcagatgcttttttgcagacatcgggaaaagaattaaaggataaaggctttacactggtttttgttaagaaagaagaccggattgcgggctgcttcgccttaaaggatcaaatccggcctgaagccaaagccgtgatggctgagcttgaatcactgggcattcaaacagccatgctcaccggcgatcagtctgaaactgcggctgccatcgcgaaagaggcgggcatgacgacggttgttgccgattgtctgccggaccaaaaggcaaaagaagtgaagaagctgaaagaaacgtacggcacaatcgccatggtcggagacggcattaatgacgcgcccgctctgaaaaccgctgacgtcggtattgcgatgggcgggggcacggacgtggctctagaaacggctgacttagtccttatgaaaaatgatcttcacaagcttgtgaaaatgtgcagactttcaaggaaaatgaaccggattattaagcagaatattgttttctcgctctcggtcatctgccttttgatctgcgctaactttctgcaggtgatggaactgccgtttggcgtaatcggccatgaggggagcacgattctggttatactgaacggactgagattattaaaataaacatgacagccgcacatcgggcggctgtttttttaatgttcgttcacagcataaacgccggaaaactgatagaatgaataaagagtcactttggtaaggaggaaaatcaaaaaatgaacagattagaacgtgtttcatcttggctgaaaaaagaaggacatgatgcggcgtttatacatacaaaggaaaacgtattttatttaactgatttttacacggatccgcatgagcggttaatgggattgttcctgtttcaggaacaggagccgtttttcgtttgtccgggaatggaagacggacaagcccgaagcgccggttgggagcatggtattatcggctacggcgatcacgaagatccgtgggagctgatcaaagccgagctcacaaaacgaaatgtgccgcttgattccatcgcggttgaaaaggattcgatctctctttcccgctcagaacagctcaaacaagcttctgggggcgcggcatttgtttcggcagaagaaacgctcaaccaattccgtctcgtaaaagatgagaaggaaatcagcattctcagggaagcggcaaaactcgcggattacggagttgaagtcggtgtcgcggcgcttaaagagggtgtgagtgaaaccgaagtactcgcgcagattgagtttgagctgaagaaaaaaggtgtgcagggcatgtcattttcaacgatggtgctgttcggggaaaaatcaggccagccccatgggaatccgggtgcagaccggttgaaaaaaggggattttgttctgtttgatctgggcgttattcttgacggctactgttcagacattacgagaacattcgcataccaatcaatcagcccgaaacaggaagagatttacgaaacggtgcttaaagctgaacagacggcgcttcaattaagtaaacccggcgtcagaatcggcgatcttgatttaaaagcccgcggcattattgaaaaagccggatacggagactatttcccgcaccgcctcggccacggactcgggatttcggttcacgaatatccatcaatgagcagcgcgaacgacacactcctcaaagaaggcatggtgtacacgatagaaccgggaatttacgtgccggatgtcggcggcgtgcgcatagaagacgatgtgtttgtcacaaaagacggcgccgaagcattaacgcagtatccgaaagaattaacgattctgaaatagaaagctttgtgataaaaaaggacggttctggaacgcagcgtccttttttatcaccttttaaatgaaaaaatcatcaaaatgctgaaatggtttgatgtcatgcttttcattcaggggccgcagggcaaggtaactgccgccgagtatggccagacacaaaccgattaagcaaagaatccccatcgctgttcttctcctttcaaacggataggatgtatctgtttctagcttactgtatgaaacgcattccagatcaagggaaaaaaagaaaggggggacgccatggctacgatcagagacattgccggcgctgccggggtttccgttacaacggtatcaagagttttaaacgatcatccttatgtaagtaaggacaaaagagaaagagtgaaaaaagcgatgcaatcgctcggatacacgcgcaacattcatgctgttcatttatccaaaggtttttccgatatgatcggcgttgtgcttccgtcggtgaaccttccgtattttgcagaccttgttgcaggtattgccgaggctgccgaagcgtcaggcgtgcatctttgtttataccagacagattatgagcagcaaaaagaacgttttgccttatcacaattacaggagcgccaagtggacggcctgattatctgctccaaagcaattcctgatgagcatttgcttgccgtgaaagaaccgctcatcctctgccagtacactgatgcggcagggctttcctccatcagtaatccacatcgggaagcatttcggcacggtctggattatctgatagaaaagggacaccggaaaatagcgatctgcctggccagaaaaaagggaaaaaacagtcaagtccgaatcgccgcatacaaagaggcgctgaagaagatcgggcagccttacagggaagagctggttgtggaaaaggtgctgacgctgcttgacgggaaagccctttttcatagatggaagagctgggatgacaaaccgactgcgctgtttgcggcgaatgatcaagtatccgcaggtctttaccttgaagccaaggcaaacgggacgcgcatcccggaagagcttgcgattttgagcatcgacaatcatgatatcagcaagatgttaggtatttccacaatagatatacaaacgaaagaaatgggaaagcaggcttttcacatgcttgagaaccggatcagcggcgggcctccgggaaggaaagttcttgattaccgccttattgaacgatcaaccgtctaaaaaaagaattgacgcgctttccgttcgttttgtacgatatgaggtattgaatgacaaaggagctgaggatcatgaaggggtcctttacagttgaaaaggtattaaataacaatgtgctcatcgcaacacatgatagatacagtgaggtcgtcttaatcggaaaagggatcggctttggaaaaaaacaagcggatgtcattgaagataaagggtatgacaagatgttcatcttaaaggatgaaaaagaacaaaaacaatttaaaaagctcctcggttatgtggacgagacacttgtcgacatctccaatgacgtcatttatcatatcaagaagcggacaagccaaccgttaaatgagcatatccatattgcgctgactgaccatatcgcctttgcggtaaagcggctgcagcaggggtttgacattaaaaacccgtttctcatggaaaccgaaacgctttatccggaagaattccaaattgcccgtgaagtcgtcggcatgattaatgaaaagacgggaatctgccttcctgaaggagagatcggctttatcgctctgcatatccattccgccctgacgaatcggcccctttcagaggtcaatcagcattcgcagctgatgtcccgccttgttcaggtgattgaggactctttccagatgaaagtgaataaagaaagcgtccactatttgcggctgatccggcatatcagatttaccatagacaggattaatcgggaagagcagacaaaagaaccagaaaagttaatgttattattgaaaaatgaatacccgctatgctacaatactgcttggaaactgataaaaatcttgcagcaaatactgaaaaaaccagttcatgaggcggaagcggtttatctcacgcttcatttgtaccgattaaccaataaaatttcataatttcagttgaaaccttaaaaacgtgtcactgattcgatcaggcatgagtgattgagggtaaaaaacgggaagaacgatcccgttattttgcacaccctttttactcatgccttttttgttgtgtaaaagggcaaatgtaaacggttaaactgaagacttgcgccagtgaattcgttgtcatgaattttcgctgtaaggtcacactagctaacagaggaggtacatcttttatgtttaaagcattattcggcgttctccagaaaatcggccgtgctcttatgcttccggttgcgattttaccggctgcggggatcttgcttgcgttagggaatgccatgcagaacaaagatatgattcaagtcatgcatttcttaagcaatgataacgttcagcttgtggcgaacgtcatggaaagcgccggccaaatcgtatttgacaacctgccgcttctttttgcagtaggggttgcgatcggtcttgccaacggagacggtgttgccggaattgcggccattatcggatacctggtcatgaacgtatccatgagcgccgtgcttatggcgaacggcagtattccgtctgacaaaattgaacgggcaaagttttttgcggaaaaccatccggcctatattaacatgctggggatacccactttggcgactggcgtgttcggcggtattatcgtcggggtcctggccgcgttattgttcaacaagttttataaaattgaacttccgcagtacctcggattctttgcgggtaagcggttcgtcccgattatcacatcaatttccgcattaattctcggacttattatgttagtgatctggcctccgatccagcacggtctgaattccttctccacgggtcttgtggaagcgaatccaaccttggcggcctttattttcgggatgattgagcggtcattgattccgttcggtcttcatcacattttctactcgccgttctggtatgaatttttcagctataaagatgcggccggagacatcatccgcggagatcagcggattttcatggctcagatcaaagacggcgtacagctgacggcgggaacatttatgacggggaaatatccgtttatgatgttcggtcttccggcggcagcgcttgcaatctatcatgaagcgaagcctgaaaagaaaaaacttgtagccggaatcatgggttctgccgctctgacaagtttcttaacgggaattaccgagccgcttgaattctcattcttatttgtggctcctatcctgtttgcgattcactgcgtattcgcgggactttcctttatggttatgcagctgctgcatgtaaaaatcggtatgacgttctcaggcggtctgattgactacttcctgttcggaattctgcctaaccggaccgcttggtggcttgtcattccggtcggcctaggattagccgttatttactacttcggtttccggtttgcgatcagaaagttcaatctgaaaacgccgggccgtgaagaagaggctgcggatgaaggtgcgggcgcctcaggcgaagccggcgaccttccttatgaaatcctgcaggcaatgggtgaccaggaaaacattaagcaccttgacgcttgtatcacgagactccgcgttacggtcaacgaccagaagaaagtggataagactcgtttgaaacagcttggcgcctcaggcgttcttgaagtcggaaacaacattcaggccattttcggcccgcgttctgacggtttaaaaacacagatgcaggatattatcgccggacgcacgccgcgccctgaaccgaaagtatccgcacaagaagaagtcagccagcaggttgaggaggttatcgcagatccgctccgaaacgagcagggtgaagaagtgttcgcttctccgatcaccggcgaaatccatccgattaccgatgtgcctgaccaggtgttctcaggaaaaatgatgggtgacggttttgcgattcttcctgaagaaggaatcgtcgtatcgcctgtccgcggaaaagtgctgaatgttttcccgacaaaacatgcgatcggtcttcagtctgacggcggaagagagatcctgattcatttcggaatcgacacagtcagcctgaaaggcgaaggattcacttcttttgtttcagagggtgaccgggttgaaccggggcaaaagctgcttgaagttgatcttgaagcggttaaacctcatgttccttcattaatgacaccgattgtctttacaaatcttgccgagggtgaagcgatttccctttcggccgaaggtaccgtaaaacgggaacaaaaagatattgtgaaaatcggaaaataagcatataaatacgccgtgcttgtcagatgacaagtacggctgtatgatataatattgtgtagtaaaatagctttaatttaaaggagaatgataatcatggcacaaaaaacatttaaagtaacagcagattccggaatccacgctcgtcctgcgacagttcttgtacagactgcaagcaaatacgatgctgacgtaaacttagaatataacggcaaaacagtaaaccttaagtcaatcatgggcgttatgtctctaggtatcgctaaaggcgctgaaatcacaatttccgcttcaggcgctgacgaaaacgatgctcttaacgctttagaagaaacaatgaaaagcgaaggactcggcgagtaatgcaagaattaaaaggaataggcgcttcagccggaattgcgattgcgaaagcataccggcttgaagagccggacttaacggttgaaaagaaaaacattgctgatgctgcggctgaagtaagccgttttgatgaagcgattgtacgttctaaagaagagcttgaaaaaattaaagagcatgctttaaaagaactgggacaagacaaagctgacattttctccgcgcaccttttagttctgagtgatcctgagctgctgaacccggtaaaggagaaaatcagcacagattcagtcaatgctgaattcgctttgaaagaaacagcttccatgttcgttactatgtttgaatcaatggataacgaatacatgaaagagcgtgcggcggatatccgtgacgtaacaaaacgtgtgacggggcacctgctgggcgtggaaattccgaacccgagcatgatctcagaagaggttgttatcgtggctgaagatttgacaccgtctgatacggcgcaattaaaccgccagtttgtaaaaggttttacaactgatatcggcggacgcacttcacactccgcgatcatggcccgttcgcttgaaattccggctgttgtcggcacaaaagcggctacagggacaattgaaaacggtgttacggtaatcgtagacggcatcgatggtgatgtgatcatcgatccttccagtgaaacgttaaagaaatatgaagaaaagcacagtgcttacctggcgcaaaaagctgagtgggcgaagctcgtcaatgaaccgactgtttcaaaagacggccatcatgtagagcttgccgcaaacatcggcacacctgacgatgtaaaaggcgttcttgaaaacggaggagaagctgtagggctttaccgtacggaattcctttacatgggacgcgaccagcttccgacggaagacgagcagtttgacgcttataaaacggttcttgagcgtatggaaggaaaatcagttgtcgtgcggacattggatatcggcggcgacaaagagcttccttacctgcagctccctaaagaaatgaacccgttcttaggctacagagccatccgcctttgccttgaagagcaagaaatcttcagaactcagcttcgtgcgctgcttcgtgcaagtacatacggaaacttaaaaatcatgttcccgatgattgcgacagtaaacgagtttaaacaggcgaaagcgattcttctcgaagaaaaagaaaaactcgtcgaagccggcgtagcggtttctgacgatattgaagtcggtatgatggtagagattccgtctacagccgttatcgcagatcagtttgctacagaagttgacttcttcagtatcggaacaaatgacttgatccaatacacgatggctgctgaccgcatgaacgagcgcgtagcttatctgtatcagccatacaacccggcgattctccgtctgatcacccttgttattgaagccgctcacaaagagggcaaatgggtcggaatgtgcggagaaatggcgggagacgaaattgcgattccgattcttctcggcttaggcttagatgagttctcaatgagcgctacatccatccttccggcaagaacgcagatcagcaagctttctaaaaaagaagctgaatcattcaaagaaacaatcttgtctatgagcacgacagaagaggttgtcgcattcgttaaagaaacattcaataagtaatacaacagccagacggtataagccgtctggtttttttcatattcggaaaaaagggggaacaataacgttcaacaggagggattattatgacaaaatcatttgcagcgggggatacggtctatgtgatttaccgcaatccgcatgccgccaatgttgcccatattaaagaggcggagatcgtccatcacccatatcatgagggagaactgtctctgtttttatacgaaacctatcatccgctggccgaagatgacgcggtcttttcaacatatgaggaagcggaagcgctttacagcgagctttttgaagaagaccgatatcattgatcaaaggaaatgtttacaacgcatattcactctcttttaaacggaaagtaacaacatgagaatatgaaaaaagggagtgtcagttcatgctgaagccgtttgtgccccagcttgtttatatagaaccgagagcgctcgaatacccgttaggacaagagctgaagaataagtttgaaaatatggggcttgagatcagagaaacaacatcgcataatcaagtccggaatattccggggaaaaatcacttgcagcaataccggaacgcgaaatcaacattggtaatcggcgtccggaaaacactgaaattcgattcttcaaagccgtccgccgaatatgccattccatttgcgacaggctgtatggggcattgccactattgctacctgcagacgacgatggggtcaaagccttacatccggacatatgtcaatgtagaagagattctggatcaggctgatgagtatatgaaagaacgagcgccggaatttacaagatttgaagcctcttgtacgtctgatatcgtcggaatcgatcatctgacacatacattaaaaagagccattgaacatttcggacaaagcgaattggggcagctcagattcgtgactaaatttcaccacgtcgatcatttgcttgatgcaaaacataacggaaagactaggttcagattcagcatcaatgcggattatgtcataaaaaactttgaaccgggaacttctccgctcgacaaacggatcgaagccgccgtcaaagtcgctaaagcgggctatccgctcggtttcatcgtggcgcctatttatattcatgatggctgggaggaaggctataaggagctgtttgagaaactggatgcggcgcttgatgaagacgttcggcatgacatcacatttgaactgatccagcatcgttttacaaaaccggccaaacgggtgattgagaagaactatccgaaaacaaagcttgagcttgatgaagaaaagcgcaggtacaaatggggacgctacggaatcggcaaatatatataccaaaaagacgaagaacatgccttaagggaaacactcgaatcttatatcgaaacctattttccgaaagcgaaaatcgaatattttacgtaaggcggagctgtcggcatgacggctcttttttttgctgcgacaaatgacggaaatgtttgatatttatttcaagatttattcattttcttggccgaaagaccgatataactctcaggaggggatggttatgtttaaaaaaatgcatatcaaaattgctgtgtttgtatcggcaatgcttattgtaacggttgtttttttaacggtttcttcatatttgacattaaagccgatgatgacggaggaagcaaaacgtacgacagagaatgtcaccaattcactcggtcagaacattgagcttcagctgaaaaatgatgagaccgtattaatgagattagcagacggtgaattgtcccggtcttttctatcagatgggaagaaagaaaccgcgcggctttttaacgatgagttaaaacagatcggacagaatgacaaatatgtcgcgcttgcgtacgtcggaaccgcaaacaaacaaatgtttacatatccaaaggccgattttgccaaagactatgatctgacaaatcgaacgtggtataagatggcggctgaaaaacccgataaggttgtctggactgacccttataaagatgcagtgacgggagacatgatcgtgacggcgtcaaaagccattcaaaacagcggaaccgtcgtcggagtggcgagcttagatttgaagctgtcctccattcagagcatggtcaacgagcaaaaggttccgtataaaggatttgcgtttttggcggatgaaaacggctctcttctggcccatccggcaaaacagggaaaaaatatttcggaagatcagacgttaaaagacatcactgcggacaaagaaggcatcaaagagctgcaggggaacatggtcgtctaccaaacggtaaaagaaacagggtggaaagtcggaacgcagtttgaaaaagatcagctgatgggagtagccgacaaaatgaacacggtgagcatttttatgtcactgatcgcccttgtgattacgatcggactcagctatttcctcgcaaaaacgataaccgggccgattcagcagctgatcgcaaaaacaaattcagtctcagcgggagatttaaccgtccgcgcccagacgaaatcaaaagatgaagtaggcgagttaacaaaagactttaaccaaatggttgaaaatatgaaagagatggtcgaacaggtcaaggcctcctcagaaaatgtgtctgatacatctgaccagctaaccgtcatttcacaagaaacaaatgaaacgagcggacaaatcgcaaaagcgatagaggaagtcgccgccggagcgacagagcaagcgtcagaggttgagacgatcaacgaaaaatcagaaaatctctcagtcaaaataaaaggaatcgcagatcgcgcaggcagcataaaacaactctcaaaatcttcagaggatgccagctacaaaggattggacgcgctcgggcagctgctgatgaagtcaaacgaagccaattcagaaacgaaaaaagtagaggcaatgctgaatgacctggaagaacaaacgaaaaacatagaagaagtcgtgacggcaatatccgctatttcagaccagacgaatctcttggcgctgaatgcgagcatagaagccgcaagagcgggagaaagcggacggggctttgccgtcgtcgcggaagaagtccgcaagcttgctgaacaatcagctctttcttccggccatatcagtgagacggtccgtctgattcaatctgagacaaaagaagcgtcacacgcgatgattgaggcaagcagaatgaatgatgaacaaaacagcgccattcatgaaacgggtgaggttctcaatctgattacaacggaaatgcagtctctcgttcaaggtatagatcatatttacaatgacattcaaaaaatgagtgaagaacaagcctcgattcaagaagcgattcaaagcatctccgccatttctcaagaatctgcggcagcggcggaagaagtgaatgcttctactgatgaacagctcgttacgcttgaaaaagtgaagcaatcgactgatatgttaaagagcgcaagcgaagatctgatcagcgccatttctaaattcaccttgtgacgcggtctctatcagcctataatatggtaatatagacatgaaagagtgatatatgaatcgcatcaggggaggaaagcgcagtgaacaaaacggtaggatttatcggtttgggcgtcatgggaaacagtatggcatcgcacattttagaagcgggctatcctgttttagtctacacgcgtacgaaacacaaagcggaagaggttctgaataagggagcggtctggcaggagacggtcaaagacctttcggaaaaagcagacatcattattaccatggtcggctatccgagtgatgtcgaggaaatctatctcggtgaaagcggcattctccgtcatgcaaaagaaggggcgtttgtcattgatatgacgacatcaaaaccatctctggcgaagaaaatagcggagaaagccaaagaaaagtccattcacgccctggatgcacccgtttccggcggagacatcggcgcgaggaacggaacgcttgccattatggccggaggagaaaaagaagcgtttgaagcatgcctgccgcttttctccgttatgggggaaaatattcagtatcaagggccggctggcagcggccagcatacgaaaatgtgcaatcagatcgcgattgcagcggggatggtcggagtggctgaagcgatggcttacgcggaaaaatccggtctgaacccggaacaagtgctgaaaagcattacaaccggagcggctggcagctggtcattgtcaaacctcgctccccgtatgctgaaaggcgattttgcgcccggattttacgtgaaacactttattaaagacatgggcattgcccttgaagaagcggagctcatgggagaagaaatgcccggattggcgctggccaaatcattgtacgacaagctttccgcgcaaggtgaagaaaacagcggaactcaaagcatttataagctttgggtgaaataaaaaaaagattgcccgccgggcaatctttttttatttattttccgatgaattgctgtgtccagatgtttcctgattctacataacccacaccgatttgagtgaactcaggattcatgatgttctttctgtggccttcactgttcatccaagctttaacgacggcttcaggagtcgtctgccctttggcgatattttcaccggcagttttataagtgattccgaaagacttcatcatatcgaaaggtgagccgtaagtcggactttggtgatcgaaatagtttttgtctttcatatcttgtgattttgcgtgagctgatttgcttaatttttcatcaatctgcagaggttttaagccttgcttttgtctctctgcatttgtcaattcaacgactttcttttcatacgcactgactgatgaaggagttttctcgctgctgttgtttgtattatctgtctgctttgcattgtcagccgtctggttttgatcggctttcggtttttcggcagctgtcggggccgttttttccggtgtttctttttgaacgtctttaactgtcatatcagaatgctttgcgtgtttttgcagcagctgagtcagttctttctcatttttaacgttcagctttttcacgctcgttttcatatgtagtttttcaacagcctcttgaagagtcagatgctgtacggtgtttccttttttcacagtaacgacgtgctggcatgacagctcttttgcagatgcctgctgaatgcctccgaatgtaatcaaactgactgccgcggcggcagataagagaaatgcttttttcataagtttatagcctcccagagaagttgtttttttctacatgaaaaatcttatcacagcttttttgtcataatgcaggcagccatttcctttgacaacaaacgtttgtcataattgtaattgagcacagaaaaatggctttatatcagtaaaaacgatctgtatttattttttaaaatccgttacatctcttcaaattatttgaagtgttagatatattttaagataatttgatcttgacagttttttttacccgttttcgctgtaacaacttttacaaaaatgttacaattaaaatctgtttatgtaaatatattcaatgatttgagaggtgtaacagaaagtggctgaagtcgcgcgcgaaccaaagaaaaaaacgaaacgttacagagcgctgagaatgaatctctattttttgattgtgtttcttctctttacggcactgatttttaaactcggcatcgtccagattgtcgaaggggataaacaccgccaggatgcggagaaggcaaatgcaaaaaccgcctattatccgacaccgcggggaaaaatgtatgacaagcggaacagggtggcggttgataaccaggctgtgcctgaaattgtatacgtttctacctcaaaaacctcggcaaaggacaaattgaaaacggcaaaaaatctcgccgcactgattcatattgatactgaatttatgaaggatcgaaatatcattgattactggcttgcggcacatccgaagaaggcggaaaagcttatgaaggattcagaaaacagcctgaaatcccaagaagtgtacaaacgccagattgaacgcgttccgaagcaggagattgatgcgatcaaacaagataaaaaagagctgcaaattgcggcgatttatacgcgtttttcaagcggcaacgcctatcagccgcaagtcgtcaaatcaatggacccgaataagctgaacggaaacggaaacagcggttcattgcttgacgagcatgaaaacaacaagcaaaaaccaaaaagcgatctgacatatgaagaagtttccgtcgtatccgagcacctgaaagagctccccggcattgacgtgatcaatgactggacgcgaaaatatccatacgacaaaacgctgtactctctgttcggcggtgtgacgacaccggaacagggattgttgggcgaacggaaagattactatgtcacaagaggctactcactgaatgaccgggtgggaaaaagctacatcgaatatcagtatgaggactatttaaacgcgcataaagaaaaagtagagtatgtggaaaacagcaaaggtgaggtcgtcagccaaaagcccgtcgatgaaggcagcagaggctacgatctgcaactctcgctcgatatggaattacagtcgaaagtcgaaaaagtcattgaaaaagagctgagaagaagccgcgccgcaggcaactatatggttgacagaggatttgccgtcatgatggacccgaacaacggggatattctctcaatggcggggaaacgcatcgatctcgaaacaaataaaacacaggattttgcgatcggagcatttacgacccaatatgagatgggctcttctgttaaaggagcgactgttctcgcgggttaccaaagcggcctcccgcattataaaacgtttgtcgatgcaccgcttgtatttaaaggcaaaacgagaaaacaatcgtggacacaaatgggagccattactgagctgaccgcgctgcaaagaagttcaaacgtgtatatgtttcatgtggccatgcatatcgccggcattacctacaggccgtacggcacgctgcctgccggattagacgatattaaaaaaatgcgcaactactacgcccaattcggtttgggtgtgaagaccgggattgatcttccgcaggaatcagcgggcatgcagtcaaatccgcaaatggtcgggggattgctgcttgactttgcgatcggacagtttgatacgtatacgccgcttcaaatggctcaatatatttcagccatcgcaaacggcgggtatcgcgtccagccgcggatcgtcacaagcattcatgaaccggacagcaaaaataagattggaaaagcgattgaacagcgggatattaaaattttgaacaaagtaaataacagtccgagcgattttgaccaagttcataaaggaatgaaattggtcacaagctcacctcaaggaacggcttattcaacattccaaggttccggcgctgatgtttccggaaaaacgggaaccgcggagacgcactattacggcacgaacaaaaactggtgggggaagtacacgtataacctgacctttgtcggctattatccgtcagagcatccaagagtggcattcagcgtcgtcgttccgtctgttggaaatgataaagatcatgtaagcaaaaacattgctaagggagcaattgacgcttacaaagaacttgaaaagaaatacaataaaaaataacaaatgaaagggcggccgaacatctcgtgcgccctttctttcattcaggaaaattgacgttcacaataagaatagaaggagaatgctcattttttagcgaatcaatctagtggaatttctttttatatcagtccgtgtccagcctgcagtgcgagtataatgcaaaggagggattctgtggaacaggatactcagcatgtcaaacagtttcaatcgaaaaccgatcttcatgccgttttgacgtctaacgggcgtattatgtatatttccgcaaactgtaaatcgtacttcagttattctcaggaagagatgatcgggtcatttctcaaaacgttcctgcatgaagaagatcaatttttggttgaaagttacttctataatgagcatcatttgatgccttgcacctttcgtcttattaaaaaagatcataccatcgtatggcttgaagcgggtgtggaaattgtcacaccgcaaatggaggggacggatcgggaaatcatcctcaaaatcaaggtgcttgaggagaagacgccccgccggccttatatgtatgaacaaaagaagcaaaaggcagaacaacagtcggaagatgcggctggaaacggcgaattcgagcgtcttgttgaaatgctgccgaatcctttatatgtcagcatcaacggcacaatcgcctacgccaacaacgcgatgcttgccatgctgggagccgaaagcaaagacgaggtaatcggcaggcgctcctatgagtttattgaagaagagtatcacgacattgtgaaaaaccgaattgtgcggatgcaaaaaggaatggaagtcggaatgatcgaacagacgtggagaaggctcgacggcacgcccgttcatttagaagtgaaggcggcaccgacgacatataaaaatcagcgggcggaattgctgcttctgattgatatttcttcacggaaaaaattccaaacgattctgcaaaaaagcagagagcgttatcagctcctcattcagaattcaattgacacgatcgccgtgattcacaatgataagtgggtattcatgaatgaatcgggcatttcgctgtttgaggctgaaacatatgaagatttaatcgggaaaaacgtctatgatcagcttcatccctgtgatcatgacggcgtgaaacagcggatccaaaatattatcaaccgaaagaccgagtcagaaatcattaagcaatcgtggtttacctttaaaaaccggctgatctacacggaaatggtctgcattccgacgacgtttttcggagaaacggccgtgcaggtcattctgcgtgacatttctgagcggaagcagacggaggaattaatgctgaagtcggaaaagctgtctatcgcagggcagctggcggcggggatcgctcacgaaatccgcaatccgctgacggcgatcaaaggatttttacagctcatgaagccgacgatggaggaaaacgaacattactttgaaattgtgttttccgaactgagcagaatcgaattaattttaagtgagcttttaatgcttgccaaacctcagcaaaacgccgtgaaagagcgtgtaaacttaaagaaaattataagtgaagtgaccgctcttttagagacgcaggcgaatcttaaagggatttttatcaaaacggattacgaacatgacagcatgtatattaacggtgatcaaaatcagctgaaacaggtgtttatcaatctgattaaaaatgccgttgagtcgatgccggatgggggaacggttcacatcatcatgacagaagatgagtattccgttaatgtgacggtgaaagacgagggcgacgggataccggaaaacgtgctgaaacgaataggcgaaccgtttttgacaacgaaagaaaaaggaaccggcctggggctgatggtcacattcaaccttattaaaaaccaccagggagccatccaagtagacagcaaaccggacagaggcacggcctttcacattacattcccgaaacaataaaaaaaacaacggcgttatgccgttgtttaaatagtctgcatggattctctcgtttttaaaataaatgcttccagccggtccaagccttctctcaatgtatccagtgaatatgcgaatgacagcctcacatacccttcacccaactttgaaaacgagctgccgggcacaagagccacacctgcatcctctaaaagagccatactaaaatcaaacgatgacattccgaatgacttaatggaagggaagatataaaatgcgcctgacggctttacgacgtcaagccccattgaaacaagacggtcatatacatagtcaagccgctttttatactgttctctcataataagcgcatcatcaacaccgtttgtcaccgcttcaagagccgctttctgagagattgaagacgcgcatgtcacactgtattggtgaacttttaagatgtgcttggcaatttctttcggtgcgaaaatgaaaccgattctccagcccgtcatgctgtgtgattttgacaggccgttgatgacgatcgtctggtctctcaaataagacgcgatcgaataatgcggtctgtcataggttaattcgctgtaaatctcatcagacaggacaaaaacatttctgcccttcaggacggctgcgatgttttgcagctcttcctcagacaatgtcacaccggtcggatttgacggataaggaagaatgacgcattttgtttttggtgtcagcgattcttcaataagccgcgccgtcagcttaaatccgtgtgtcgtcgtatccacatgaaccggaacggcgcccgacatgcggatgatcggttcgtagcccggatatatcggtccggggagaataacttcatcgcctggagataaaatcgtccgcaaagacgcgtcaatcgcttggctcgctccggttgtgacaatgatttcagtttcagcctcataattcaaatcagcttttttcttcatataaagctgtacggcctgtctcagctcaaggccgcccgcgttcggagtatatgccgttgcgttctcgtcgattgcctttttggcagccgctttgacatggtgcggcgtgaagaaatccggctggccgatcgtaagcgaaatgacattatcgtgctgagctacaagatttgagaatttgcgaattcctgaaatttcaatttcttttacattcggattaagcaaatgttccataattcatcaccttatactatatattgagtttatcctattttaccactagctgagcatttgtcatctttttattgaactatcccgagtatatgtccgatatgtgaaaacataccttttttcagaaaaaaataagacaaccagctgaaatgattgtcttcattgtatcatgatctatctattgtgatatgtggcgaatgtcattaatacccgtattcaaagctgacgtcttcccgccataagatgtatggagcgggcttgtcgggacgctctttcgcctcttttttcatttgcaggtaagccgttttgctgatatcttctaacaccgtcatttgatcttggtcgaatatgactactgtacccatttattacacccttcttcctgaaaaatccttgactattttaccactcgatgtcaaaaagtcaatgggatatcagaaaaaagcatctttttataaagagttcatggccagttggcccgaatacattcactttttccgtttacagccgatatatacagtacaatactgaatgcggatagcgagggattgaattgtctttacaacaatacgatattttattggattcaggcacaaacgaattagaaatcgtcaaatttgaagtaggcgtcaatacatttggcataaatgtgatgaaagtccgggaaatcattcagccggtagatgtcacatctgtgcctcagtctcataaagacgtagaagggatgattaagctgagaggcgaaattcttcccgtcatcagtctgtattcctttttcggcgttgatgccgaaggagcaaaagacgataaatatatcgtaacggaattcaacaagcggaaaatcgtctttcacgtcggttccgtttcacaaatccacagggtgtcctgggaggcgattgaaaagccgacttccctgaaccagggcatggagcggcatttaacgggaatcatcaaactggaagacacgatgatctttctgcctgattatgaaaagatcatttacgatattgaatcggcatccggagttgagacttatcatgtccatcaggaaggatttgatgaaagacgggcgggtaaaaaactgatcatcgttgaagattcgccgcttctgatgcgtcttttgacggatgagctgactgaggcggggtacagtgaaatcgttacatttgaaaacggaaaagaagcgtatgattacgtcgtggaactgacggataacggagcaaacctgtcagatcatattgacatgattatcagtgacattgagatgccgaaaatggacgggcatcgtttgacgaagctccttaaggataacccgcaaagctctgatgtgccgattatgattttctcgtccctcattacggacgacctgcgccaccggggcgaagtagtcggagcggatgaacagatcagcaagcctgaaatcagcgagctcattaaaaaagtggatacgtacgtgattgaatagaaaaaagccgatgcatgacgcatcggcttttttgcggcggaattaaaaataactctcaccaagttttttaaatacgggtttatgataagcgggctgctgcctgttggcggcaagcggtttttcctttaagcccacatatttttgcaatacgtttttcgcttttgtcaaagacatttgtgctttaggattgcggtacgattgatttaacgtacctaaatgcggaagatgctggaagtcttcttttgttggaggcatgtgaaaatagtagtctccgatagagataagtacgtctgactgctgttggctaaacctgggattatttgaaaagtgaagccctatttttttccctttgccttctttcacaagcttttgtaatgcccgttttttcagcagataaaggtatttagggttgggggcggtttttgcatggcggttcacagtataaacagcttttgaaagattctcgatggttggctgcagctctttcgaataagcgtggtcgtccattatttctctcctttgcattgatcaagttcatatatagattatacttttttagcgttgaaatgcaaatattgattataaaaatacgcctttttctgatgaaaagggcgcatttttttcctttattagacaggtttcgcatgtttttcggaatcagcctttaatgattgctgcacatcgacctctgctgcctcggcgctgtatttcggaagagcgataaaatagaacacaaataccgctaaaatcacgattcccatgccgtaataaaggtaatcaatattggaaacgaatttcggaaataacagggcaaccagtccgagtgtaatcgattgggcaaacatcataaaaggatcctgccagccgctgacccggcccattattttcggatgaacgattttcggcatccagccgccgatggcgatattgacagggccgatgcacatgccgaggatgaaagccgccgcataataaatccacagcttatccgtatagccgaggacaaaaatgagcagtccggctgccaaaataggaatcgacatcaaatgatgcggtttgactttttttgcgatcattgttccgatcacacttcctgcaagcaggccgaagccgagtgcgacggtgaagatggaagtatgtgattcgtaatgatcaggcgcaagtccgtatttcatcgtaaacatcggcagtacggcaaagccgccgttgacaaaaccaaagataaaaaagccgaaaataagggaagcaagcaatttgtttttaacaatatatacgatcccttccttaaaatcagcgaccgagtctttcagaaacgaatctccccatttaaaagggccgttcggctgacgggcttctttcggaatgcggcaggcgcggatcagaaagcctgatacaataaagctgacaaaatcaaggataatggctccgtgaataccgatcgttttatacataaacgcgcccataccgacgccgaataccataaagatgctgaacaggatctggttaagtcccgccgctttcgcataatgctccttaggcagaatagcttgtacaaggctggcttccgccgggaaaaagaacttggtcacggcgcttctgatgaacaaaatacagaacacgagagggatgctcccggtgtataatgcggcaaataatacgatcgtcagtccggctctgatccaatcacaattctctgcgacctttttcctgtcaagccggtcagctgcgacaccgacaatcagaaatacgaaaactgtcggcagtgaatacatcagctcagccaaagttgtgtatgccggctggtttgaaaaatggtccagcaagtaaaaagcgaaagccatattacctacagtcgttcccatttgagaagcgagtgctgcgaaaaagagacggacaaaattgcgatttttaaatatatccataaacacgctccttaccctaaaggtcccactgtaatatattatcatcagctcgttccattaacaaataagatctttctatcttataatggtcacccttgttccattaggaacggtagcggcaagttcagtgacgtcctgattatacatccggatgcatccttttgataccgctttgccgatggaggaagggttatttgttccgtgaatgccgtaatgaattttagagaggctgagccaataagcgccgaacgggccgccgggcttgggctggcggttcacaatgtaaaattctccggtcggcgtggtcgtcaatatttttccgactgcgatggggtacgtacggatgagcctgccgaggcggtataactccagtttcttcgctccgatatacacgacaatggaatagggaatggtggatgggtcgggaagattcggtatgataatgtgctgtcccgcgtatatgaccgattggattgagggatttgcctgaaggagagcagcagtgcttattctgaagtcttgcgcaatgcttgagatggtttctccttgtttcacttgatatgtcagcagtttcgtcaccctcctttttgctcttttccatatacatattacggaggggatgtctgtgcatcgggataaaagtcttatttttgtacggttttcaatgtgaacagcgtgatttccggtctggctaaaaatcgatacggcagtcttgtcgtaccgagcccgcgattgacgtaaacggctgtgtcatgcagcgtatacatgccgtcggtatacgtttttccgtatggaggcgtaatgagagggccgaaaaacgggagctggacctggccgccgtgagtgtgtcccgacagctggaggtttacgggatatccgccgatcttgagagcggcatcaggctcgtggacgattaaaatggaaaacgcatcttcggaaaggcgggaaagggtgccttcataatcgggttttccgagcattacatcatccaaaaacgcgagttcaatccggcttccgtctgtcagctgcacctgacggcagccatttcgaagcacttgaaaatcagccgcttccatcagagccttgtacgtgttcgtaccgtagcctccgtggtcatggtttccgtaaacacaaagtttgccgaagggagcttccagattttgcagcacggccagtgcttgctggtgatcattaaataaatgcggcttatcaattaaatctcccgtaaagatgagcagatcgggtttcagctgattgatcttttccgctgctttattcaagtcaccggatgtaaacacatcactgagatgcgtatcgctgaattgaacgattttaaaattgtcaaagccgcgggggatcaggcggctggtgattgtatgacgggtgatctcaatcatgcgcggttcaatataccgggcatagccgtaacctccgcaagccgttgcgagagttgcacccaaaatgccgaatcctctttttaaaaatgttcttctcgtcattttctccatatgtaaaaccaacctttgtcagagttgttctattatatcatcagcctggctgaaaaatcccttctcagcatgtaatgacgcggaaagacatctatgataaaattatgaatgattattcattcaataaaaggggtgggtttgttatggataagaaagcggtaatcattacaggcggttcaagcggcatgggaaaagcaatggcgaaaaaacaggctgaattaggatggcacgtcatggtgacagggaggaaccatgaagcacttgaggaaacaaaaaaagaaattgagacctttgaggggcaggtcgcctgttttcaaatggatgtccgttctgattccgccgcttcagacatgattacagaagcgaaaaaagtctttggccggctcgatgcgctgattaacaatgcggccggcaattttatttgcccggcagagaagctgacgcccaatggatggaaagctgttattgagattgttttaaacggcacatttttctgcagccaagccgcggcaaggcattggatcgagcaggagcagaagggcgtcatcttaaatatggccgctacatacgcatggggagcgggagcgggtgtcgttcattccgctgcagccaaagcgggggtattgtcactgacaagaacgctggccgttgaatgggggagcaaatacggcatccgcacaaacgcgatagcccccggcccgattgaacggacaggcggtgcggagaagctgtttgaatcggaaaaagcggtgtcccgcactatgaacagtgtgccgctcggccgtctggggacaccggaggaaatcgccgctttggcagcgtttttgctatccgatgaagcatcctatataaacggggattgtatcacaatggacgggggcaatggctgaatccttacccgttttaatttacatgacatattttgcaaaacaagcgaacgttaaaggtgaccgttcgcttgttttatttttctattcaaaattatgatataatttttaaagattaagaggtgaataagtgaagaaattattaaaatggttcgttgtactatttgtaagcagtttcgttatcatctttaatatttggtactttatcatttgcgcttttactccggagtattatcaaaataccaatcttacatctgatgaaataatcagatttgaaaagctatatcatatagattttcctgatgaaacgaaatttattaaagccagggagtatttgagtgggctcggaggcgatacatcggctgtatgatatgtgtctctgccaaccaagctggcggaaacaattttatctgattatacgtatatgccaataaatcatactgatcatgccggttcaatgtatgaagttgacgtttccaagagtgctggcgggttaacaactcttacatttggcactttagataaaaaaggaactttctttcagttgaaacatgatgatgattggatatttaacagtactgattggagccattatttttggacagccgccggttatcatgctcttatatttatccttttatttgtgatggtgaaacaaatgaataacgtccttaattaaccggtctgaagagtgatcttaaaaagttttccccttttattttaaactgctgccatactgcctcctttttcccctaatctaaacatttgtggtgctgatataattgtgtataatcagacaaagatagagaagcaggtgataacatgttggacccacttgatatactgacgaatattgatgatgttattccgtattaccaagcgatttttaacgctgaggaacaaagagtcgtaggctacgaagtgcttggccgtattttggcagatgcggagattgagagcctcgggccgtttttcttagattccggcatcccggaagaatataagcttgaggtcgatgacagagtcatcaggcaggcgctggagcggtttaaagaagctgatcgcgatctgttgatttttatcaatcaggatgcgaatgtattgatgcttgaccacggcgagagctttcttgagcttttgaaagaatacgaagagcagggcattgaattgaaccgtattgtgcttgagatcaccgagcacaatttcgaaggcgacattgaacagctgtaccatatgcttgcctactatcgtacatacggcattaaaatcgcggtggacaatataggtaaggagagcagcaacctggacagaatcgcgctcctttcaccggaccttctgaaaatagatttgcaggcgctgaaagtatctcagccgtcaccttcgtatgagcatgtgctgtacagcatttcattgctggcgagaaaaatcggcgccgcgctgctgtatgaagatatagaagctgattttcagctccagtacgcatggagaaacggaggccgattttttcaaggttattatctgcaggcgccgagcggcgattttatagaccggagcctgttaaaagcacgcttgaaaacggagtttcagcaatttatcacgagagaaaaaaagaagctggagacagtatacgaacactctgagaatttttataagcgggtcaatcaggcagtttccgaactgaagaaaacccatcaggcggacgatgagtttattaaaaaactggcggaaaacctgaccgactgctgtttcagaatttatatgtgtgatgaagaaggctatcagctgacgggaaatgtgttcaagcagtccggcgaatggctttatcagcctgaatacgtggagaaaaactggagctggcgtccgtactttttagaaaacattatgaagatgcggaattcaagaaaaggctttttcagtgacctgtacagtgatattgagacgggtgagatgatcagaaccttttcatacccgatggatgacaatatgtatttatttatcgatctgccttactcttatttatatgaacaggacgggttactttaaagcggctgcagtatgccgcttttttttataaatgtgaaaaagttttaaaaaacgattgacaatgatagtgataatcattatcatttagttatagagagaagttactctctgttccccaacccctctatcagatcaagatccgaaaaagcttggcgctacccccgccaagtttttttatgctgtctgcgcataaaagggcttctccttacatacatctgacaatggcggctcaaaaagcgaaaaattatttttgaaaggtgtatgacattccgaaaaaagcttcaaactattcgaaaacacggttttcccgtttatttctttttgaaaatccagcgggaaaatgccatcccggtctactttatggtatgatgctctgtaggacttgtattataataaatacttgttgatttgaagttgttttttgaaaggagtctttttttagaatgtcacaattaatgggtatcatcacgcggctgcaaagtctgcaagaaacagcggaagcggctaacgagccgatgcagcgttattttgaagttaacggcgaaaaaatttgcagtgttaaatatttcgaaaaaaatcaaacgtttgaactgacggttttccaaaaaggtgaaaaacctaacacatatccgtttgataacattgacatgatttctattgaaatttttgagctccttcagtaatgtgatttgatttttcaggctgaccaagcttccggtcttccgcaagcggagctttattaaattatgcaaaggaacgtgcttgttcgtttggttgtagactctggaaagaggagtgtccgtacatggctgattcttttctgttttataatctttctgaggcacagatgacctttcaagacgtgacggagcggctgaaacgctttgtcaataaagacccccgttcagcatacgtgctgtctgtagggactgattcacaagtttaccgcgacttcacaaagtttattacggctatacacttgcaccgtacaggcaagggagcttggggctgtttgaaaaatcacgaccttgcaagaccgatacatagccttcgcgaaaaaatctcgctggaaaccgcgttcagccaggagatggctgcgcatatcctcgacggctgtcttatggaactgacagatttgctcttgccttttgcggatgaaggggcggatctttcatttgaagtgcatctggatatcggtcaaaaagggctgacaaaagaattgatacaagaaatgaccggccgcattacctcgatgggtattgaagcgaaaatcaagcccgattcctgcacagcattcagttatgccaatcgttacacaaaataatatttcatacagaatccgcaaaatgtcgaattatgcggttgacgatttttttctgtttacttattctagcggtagagctgaaagcaaatttcacattgctttcagaggtattcagttaaaaatagggggcctgattacgtatgagtcttatcagtgaacgatttacggaagaagaacagaaacttctgctgaatatcctgatcaatcaagaatatgccattgagcttttgaccagcgaaatcaacgatatagaagcagggtcaaaaagcgttgatgggaccacttataaaaaactcgtaacgctctatgaccgttttcggaacgaaaattaatcagcggcctataaattgatactcgattgcaaagagtatcttttttattgacggaaacttttcgacaaaaaatgataatgtttatattattgcaatatagggaatacatgctttgatgaaaaatgtaaaggggtcgaagtgacatgattagcttacaatcagatcagcttcttgatgcaacagtcggacaatttatgatcgaggcggataaagtggcgcacgttcaagtcggaaacaaccttgagcatgctctattagtgctgacgaaaaccggctataccgccattcccgtccttgacgcttcgtaccgtctgcacggtttgatcgggacaaatatgattatgaacagcattttcggacttgaacggatcgagtttgagaagctggatcaaattacggttgaggaagtcatgctgaaagacattccccgtctccacatcaatgatccgattatcaaagggttcagcatggtcattaacaacggctttgtctgcgttgaaaatgatgaaggcgtctttgaaggcattttcacgagaagagtcgtattaaagcagttgagcagtcatatcagatcattgaataagtaggctcgcacgatcagcctatttgttctttcgcatgccagaaaaagaaaacgcatacatacgagtggcgcttgcctcggcagcctttatttgattagaatggtagataaggaatacgaaaaggcattgaaaaggaggacgacatgcagcttcaagagcttcatatgctcgtagttttagctgaggaattaaacatgaggaaggctgccgaacggttattcgtgtcacagccggctctgtcccagcgattgcagaccattgaaaaaacctggggaacaaagatctttcttaggtctcaaaaaggacttacggtaacgccggcaggagaaaaaatcatacaatttgcaaatgacgtcacggatcggcaagaaagaatcagagaaaacattgatgaacttgagggtgagattcacggcacattaaagcttgccgtcgcctccattatcgggcagcactggcttccgaaagtgttaaaaacatatgtggaacgatatccgaatgcaaaggtctctctcattacaggctggagcagcgaaatgctgaaaagtctgtatgaagatcaggtacatatcggcattatccggggaaatccggaatggaaaggccggaaagattatttaatgaccgatcatttatatttggtcgatacggaaatttcctgtattgatgatattgcccataccgaccggccgtttattcaattcaaaagtgacagtacatattttcaggaaattcagcattggtggcatcaaaaattcaaaacctcgccgaaacagaccatccttgtcgatcagattgaaacgtgcaagcaaatggcgctgcacgggatcggttatgccattctgccgtcagtcaccttagaagaggaagataaagtaaataaaatgcccctgcttgatacaaaggaccatccgatcggccgtgacacatggctgctcggttatgagccggcatttgaattaaaacaggtgcaggcttttgtttctgtcattaaagatatgctgaaacaggaacgcccattttagaaagacagcaatcatgctgtcttttttttattttttattgacaatgaaaatcattatcatttaaagtgttatgtatgttaatgaaaatcattatcaattacgaggtgatcatatgcagaaagcattaatgatatacgcaagcatgtcggggaatacagaggatattgccggcattataaaagaaacactgagcgggcatcagatagcggttgactgtcttgatatggacgaagcagatgcggattctctcaaagcatatgattatgtttttgtcggcacatacacatgggggatggtgatcttccttacgaagcggaagatttttacgaagatattctgcacagccagctcaacggactgaaaacggcctgtttcggttcaggcgatcacgcctacccgaagttttgcgaagcggtcacgctgttttgcgatgcgtttgaacaggccggagccaatttatatccggaaacgctgaaaattgagctggcgcccgagacggctgaagatcaagaatgctgcaaagaatttgtccgcggttttcttgcatgggccgctcaccacggagaccggtgccatgtttcataaaggcgcgacggctgtcatggcatcagtatcttcaggattttttgtcgctgtgaaaggcgaaggtatttttcatttttcggcggaagaaggctggaaaagactattccgagtgaagagcaggattcatgtgctgacttatatagggccctacatattcgcggctggagaaaaaggcgccgtcctcagatcggccgatcaaggaaagacttggacggcctcccgatttccgaccagcgcctccgtatgggccgttgccgggcggaatgacggatttgtctgtgcgcacggcacatactgcatctacttatctgatgatttcggcgtcacttggcatgtggctaagcctttttcacaattaaaggagccgcctgtcatccgttcgctttgtttacacggtcagacggtttatatcggcacccggattcatatgaatcatggcggcatttgggcgtatgatctgacgacggaaggccgcatccggcgtataagccgcgaaaggcagcgcatgacggcttcaatgatgatgtatcagaatgactggctcattgcagcaaagggcgcggcaaagggagaacggggggagcttgctgtccgaaacgtgcggacgcatgaggagtttgccattacagccggggacaatgtacgggaaaaatcatttcttgacgtgtctgaggataacgggattatttatgtcacttcgtcacaggacgaaagcggattttcgcgtatttatcaagctgatctcgctgccggtgaattaaagtggtttgatacgatccgcggtcacggatggcgggtggccaaccgggaagaagattttttttgcgcgggcctttacgaaagtaagtttgtcagaccgtatgaggcggttcggctcgcacattagtttttatgcataaaggagagacgaagatggggaatgtattgcttgtttacgctacaatgtcaggaaacaccgaggcgatggcggatttaattgaaaaagggctgatcgaagcacaagcatccgtagacagatatgaagcgatggatattcatgccggactttttaatgattacgagtatattttattaggcacatatacgtggggagacggggatcttcctgatgaaatgctcgatattgctgaagatatggaaaaactggagtttacgggaaaaacatttgctttgttcggttccggagatacgtcctatgagtttttttgcggagcggttgacgaattggaaaaagtaatcacggcccgcggcggacgggtggtgctgccgccggtcaaaattgaaaacaaccctgagggcagtgaggaagaagagctccgggaattcggaagacagtttgccgcgctgtgcagccagccggcagaataaaggcttgttcctttttttcttgtctttgtatccttcctttgttacagtaatgaggtagaaaatcagaggaggacaatacatatgaaaatgatggatgcaaatgaaattatttcatttattcaaaatagtacaaaatcaacgcctgtaaaagtgtatgtaaaaggcgatctcgaaggaatcagctttggcgattccgctaaaacattcctgaatggccaatccggcgtcgtttttggcgagtgggctgaaattaaaagcgcaatcgaagaaaacaaagacaaaattgaggattacgtcattgagaatgaccgccgcaactctgcgatcccgatgcttgatttaaaagatgtgaaagcgagaatcgagccaggcgctattatccgcgaccaagtcgagatcggcgacaatgccgttatcatgatgggtgcatctattaatatcggttcagtcatcggcgaaggtacgatgattgatatgaacgttgttctcggaggacgcgccactgtcggcaaaaactgccacatcggagcgggttctgtattagcgggcgttattgagccgcctagcgctaagcctgttgtcgtagaagacgacgttgtgatcggcgcaaatgcggttgtgcttgaaggcgtaacaatcggtaaaggcgcggttgtcgccgccggagccattgttgtaaatgacgtcgagccatataccgttgtagcgggaacaccagcgaaaaaaatcaaagatatcgatgaaaaaacaaaaggcaaaacagaaatcaaacaggaattacgccagctgtaaggaatggtttgatagaatgggcgtggatgataaaatccacgccttattcttatctcaaggaggaatacatatggaaaaagagcggctcattgccatccgaagagatctgcaccgcattccggagatcggctttcaggaatataaaacccagcagtacctgctgaatcttttaaaccaatatccggaagaaagaattgaaatcgaaacttggagaaccggcatctttgtcaaaatcaagggcacggctccggaaaaaatgctcgcctacagagcggatatagacgctctgtcgattgaagagcagacggggcttccgtttgcatctgagcaccccggttttatgcacgcatgcggacacgatatgcacatgaccatcgcgctcggcattattgatcattttgtccatcaccccgtcaaacatgatctgctctttttattccagccggctgaagaaggaccgggcggagcggcaccgatgcttgaaagcgatgtgctgaaaaaatggacgccggatttaatcaccgccctacatatagcaccagagctgccggtcggcaccatttccaccaaaagcggattgctgtttgccaatacgagcgagctcgtcatcgatcttgaggggaaaggcggacatgcggcatatccgcatacagcagatgacatggtcgttgccgcgagcacgcttgtcacgcagctgcaaacggtcatatccagaaatacggatccgcttgacagcgctgtgataactgtcggaacgattaccgggggcacggcgcaaaatatcatcgcagagcatgctcatctggagggaaccatccggacgctttccgaggaatcaatgcgtatggtgaaaaagcggattgaagagcttgtcaaaggaattgaaatcggcttccgatgcaaaggaaaagtcacgtatccgtccgtttatcatcaagtttataatacaagcggcctgaccgaagaatttatgcaatttgtcagcgatcatcagcttgctgacgtgaaaacggcgaaagaagcgatgaccggagaagatttcggatatatgctgaaaaaatatcccggctttatgttctggctgggggccgattcatcccacgggcttcatcacgccaagctgaacccggatgaagatgcgatggaaaccgcggtaaatgtcatggtcggatatttttcgaagtatgccaattaaatccgaaaagaagaataatctaacaaaaattgagcattctacataacggaggtgttcaatatgacgaaaaaaattggaattgaacaatctttatcggatgtagaacaggcgttaaaacaaaaaggatatgacgtagtgatgatgaagactcctgaggatgcgaagaattgtgactgctgtgtcgtaaccggacttgacagcaatgtccaaggcattgccgatacgtcaactcaggctcccgtcattacggcttccggaatgaccgccgacgaaatctgcagcgaagtggaaaaaaaatttcattaaaaagaaaaaaccgaagcttacgcttcggtttttctattcggcggaagcggcgtttttaaaacggtcgagcgcgattttcatttctctccgcagtacgcgttcaacccgccattgctccatattttctgttttggcaatgattctgatcaccatttctgacgtgcttaaatcctgaaccccgatgacgtccggcccttccttaatctgcgggagctcagcggctgctttgtcacacgcggtttgcaggatttgaatggtttcatcaagatttttttcaagcggcactttaatatcgacaagcgcctgcatcgttccgcgggaatggttgctcacattcgtaatgccccggttggggagatagtgaagcgtgccgtcaaagctacggatttgcgtcgtacggagaccgacctgctcgacaatgccgctgtagccggcaaccgtaatataatcaccgacgtcgatctgtttttccaaaaggataaaaaatccggtgacgatgtcactgacaagcccctgagccccgaagccgacggcgagaccgaccacgccggcgccggcaatgagagcgctcggattgtagtgaaataaatccaaaatcattacgataaaaacgaaaatcaggatgtatccatacacattaagcgcgaggcttcgcaaagtataagcgcggcctgtggagaggttgttttgttgctcgaatttctgaaacagatgcttgatcagcttttttcctgccgtccggaaaataaaatacgctaaaataatgagagccagctttatgatgaaaatcccggcagatgtgagaagcccggcccaatcaaagtgttttaaatcaatcatagtgatgtcttcctttcaagtctattgaggaaaaagctaaaagtgatatacccgttttttaaataagataaaccttttcatagaaaccagttattacatttatgatttgttcatattgcccggtttcaatatcttcatttttgtgaagatatgaactaaggaatcgccacactcattttaacatggtgattcagccaaatcatttcctttggagggaaaacaggagaacgttgccaggcggactgaaagccccggcaaaaaacttttttcataaggagggaaataagatgaaattacatcagcaaatgcctgaattaacaggcgctaaagcatggattaacagagaagttacgaaggaacagctggtcggcggaaagccggcactgattcacttctggtccgccagctgccgcatgtgtaaagaagcgatgcctgaggtgaacgggtttcgtgataaatataaagatcagctgaatgtggtggccgtccacatgccccgttccgaagacgatcttgatcttgagaaaatcaagaaaacagcggctgaacacgatatctctcagccgatttacgttgacagcgatcatacgctggctgacgcatttgaaaatgaatatgtgccggcttattacgtttttgataaaagcggacagctccgccattttcaagcgggagagagcgggatgaaaatgcttgaaaaacgcatcagccgggtactttcagaaacggagcaggcttctgagtaatcgggacaatctccgccggactattgtctcggttctgcaaaccctttgccgttaggtaacagggtttttttgtggctattggataaaaaattccaatatggcatgtatggcttaaaaaataagagaaacagccgtaaacacgctgtaccgcttgttttatccatatcattaacttttacatattatagtcgaaaattgtagatatcacgctaattttcattaaacaagtaatttcaagttatattttgaaatggttcaataaattggaactttgtccagaatcccctatatgataagggatttttgtatataaagtaccattttcagaaaataagcaatttttcatagagtaaataaaatagtaaaatgataaaataatagttgataaaattacttttgtaatctaatatcttaataaaagcgtttaaatttttgacagggggttttacacatgtttaatgaaagagaagcgctgcgcttacgtttagaacaattgaacgaagcagaggtaaaagtcattcgtgaatatcaaatagaacgtgataaaatatatgcaaaactgagagaattagacaatacgggcagcctgtccgatacaaaaaaagagtttcgtccggagaaaaaaagtgactctctcccggtgcttgcagagcttgcagcacaggaaatgagaagctatcaaaagccgcagacacagccgcaatcctcccagccgcagatgcagtctattacgtctcttcccgccggcattccagacggttctacaagaagaagaagagggacggcgagaccgggatcaaaagcggcaaaactgcgcgaagcagcgattaaaacattgaaacgccacaatgcagcgatcaaaagttccgaactgcaaaaggaaattgaaaaggaaagcggccttgaaattcctaatatgacaacatttatgcaaagcttaattaaaatgtatccggaagtgaaaaaaccatatcgcggccaatatattcttgagggagaaatttctcaggaaacagcagaaacggcaaatgatacggctgctgaataaaacagtaaaaactgcttgcgttactcaagcagtttttttgcgttttcccgtttattctgcggaagtgacgcatcttttccaggctttttttcaagcttgacaacatatttttggaaaggcttttcgccgtcagctcgttctttcaacgcatccagtttttcatcaaacgactgatcgcgggactctgattctacaaattgtttttgaagggagatgacttgttcggtaacggctgtaagcaagtcttctgcctgaacagtctctttggaaacggaagggatttccagagtttgttccgccggttccgccgtgcggctgtcaatatcagcaaaatggccggcaatccaagcatcgctttcgtcaagctgccgtttatatgaaagaatggtttcttgaaataacttttctttcgttttttctatttctacaagccgttcttttgtttctagtattcgatctctcatatgattaatttctattttaatatgtttgagctggtattctttttctatcatttgtgtttggagccgggtattttcgtctgcagcggcatgataacgctgtttcatatcttcgtgagaagtccgttcggtttgaacggcggtctcaagtgagcggatgcgggtatgtaagtttttattttcttcttcaaattttacatttgtaagatgcagccgatgtttttcttccatctcatttttccgccgaaacgtttcctgctgaagcagttcttgcagaatgacgattttatcgagcagcccggccctgatttcatgcaaagaacgttccgtgtcactagtctgtttgtgtttttgcgccatggcttccaattcgtcagaaagcttgtgaagccgctctttaatattggcgttttcctcctgaagcttattgtttttttgatggaagtagcttgcttcaaattccgaaattatttttctgcatctggaaagttcggatttcaagtaaaggttctcttgagaagtgtcgtggaaaaacggacctgatattttcataagaaccatctccctcttgatgttaacactacaatatgggaaaggaacaacggctattcctcttaattaaacagacaagcaccgtaatattgtatttcggctgaggcgtttgctatgcttttatatagaatgggagagcgatgacatgaaacgggtgaatgtaatattagcgggggagcttcccgaagattcggagaaccgaaagcttttgcaaagtggaagggcggcatgttttatgaacaggcgaaaaaagccttcggcggcggagaaacggtaattatcagccgccctgagcatataaaaaagttcttatcaaacagggagcggcatgtttttgccgatgagccgcggtttcggggaatgggcccgcttgccggcatatatacggcaatgaaacaaacggaaggcgaaacatatacggtcatatcctgtgacacgccgctcgtgacaagaaaaacgatggctgcgcttgaaatgaagctgacgggaaatctggacgctgtcataccggtttgtgaaaacagagagcagcccctcttggcggtttaccataaacgggtgcaggatgtgctttttgatcagctgacacaaaacaaactgaaaatgacagacacgctgaaacggctgtctgtctgttatgtgcaggctgaagacatcggcgccgggccggaggagttcgctaatatcaacacacgggacgattacaccagacttttggcgcatgtcgagtcttcaaatcaggactgatcggtaagaaacatggtatgatggaaataaaaatgcaaggggacaacacagatggaagagcgctattcacggcagacaagatttaagccgataggggaaaaagggcagcaggcgctggctgacagcagtgtcctgattgtcggagccggagccctcggaacagccgcggcagagggccttgcaagagccggagcgggccgtatggcgattattgaccgggattatgtggaatggagcaatttacaaagacagcagctgtatacagaagaagacgcgagacagcgcctgccgaaagcaatggcggccaaggcgcgtcttttagcggtaaacagtaatatacatatcgatgcttacgcggcggaaggtacggcggaaacgctcgaaccgctgatcgaacaagcggattgcattgtggatgcgacagataattttgaaacgagaatggtcatcaatgatctggcgctgaaaacgaaaacaccttggatttacggtgcctgtgtcagcagtcagggaatgtgcatgacgattattccgggggttacgccgtgtttatcctgcctgtttgagcaaatgcccgtgggcggagcgacatgtgatacagcaggcatcatacctccggcggttcatatcgtctccgcctatcagcaggctgaggcgctgaaattgctgacaggaaatcatgcggcggtaaatcggcgctttttcacgtttgacgtgtggaataacaccaatatgagcataaatgtggatcagatcaaacgggatcattgcccttcctgcggcgcggagcccgtatatccgtatctgcagcctgaaaacaggccgaaagcaagcgtgctgtgcggaagagacaccgttcaaatcagatcggaagccttaaagaggctggataaagaagagcttgtcaaacgtctgaagcagatcggtaaagtggaagcaaatgaatttttgctgcacatggcgtacgagcgcttcagaatcgttatttttcaggacggacgggctctgattcacggtacaaacgatataaaagaagcgaattcagttctggccagagtgatcggactgtaggaaggggatgtattgctatgcttgaaaaaagaacgccgattcaggtggacgaagcagtccgccgggtgagccggtataaaaaaaagggggataccgaatgggtggcgcttgaggacagtctccaccgctatttggcggaggatgttaaggcggatcatgatgtgccggcttttaaccgttctccgtatgacgggtttgccatcagggcgagcgattcaaaaacggcttcccgtgacaatgccgtcacctttgaagtcattgaccatatcggagccggcgccgtgtcagaaaaagaactcgggccttatgaagcggtccgcattatgacgggggcgcagattcccaaaggcgcggatgctgtagtgatgcttgagctgacaaaaacgttttctgaaaacggcacgaattacatgtcagtgaaacgcccttttcatgcgggcgataatatttcatatcaaggagaagatgcgaaaaaaggcagctcgctattaaaaaagggacgaaaatcacgccgggcgtaaccgctcttttagcaaccttcggctatgcttccgttcccgtggtcagaaagccggttgtcggcattatcgcaacgggaaccgagcttcttcatgtcagcgatccgcttgagccggggaaaatccgcaacagcaacgctgccatggtgtatgcccaggtcattgaagcgggtgcagtaccgctgaacttagggaaaatttccgatgattttgatgacagctatgctgcggtgaaggaagctatgaaaaaagttgattttctgatcacgaccggcggcgtgtcagtcggcgattttgattttcttccggacatttataataagctcggagcggaagttctttttaacaaagtggcaatgcgcccggggagcgtgacaactgtcgcccgggccgatgacatgctgctgttcggcctttcaggcaatccgtccgcatgttatgtcggattcaccctgtttgtcaaaccgatgattcagacatggcttctgaatgaaaaacctcattccggatgggcggaagccgtgttaacaaacgactttccgaagccgaatccgtttacgagatttgtgagggcatttgtttatcataaggacggaaaaatgatggcgtcaccggtcggtctcgacaaatcaagctcagtcacatctcttgccgaagcaaacgcgtttatccttctgccgggaggaacgagggggtatgaagcgggccggacggttcacgcgctcctcatccgtgatgagaatggaagtgaatggccgtggtcaattctttcccgatcgtccagatcgtaggttttcaaaacagcggtaaaacaacgtttattgaacgtgtgctgaaagctgcgccgaaagagtgcgatattggatgtttaaaacatcacggacatggcggagaaccggaacctttttctgacggaaaagactcggagcgtttttcaaaagccggagccgcggttacggcagtagaaggggacggcgtcctgcagcttacggcgcgaaaaaaatgggatctggcgggtttgatcagtctgtatgaatgtctgggaattgacggtcttctcatagagggatttaaacatgcgccgcatccgaaaatcattatgatcaaaaacagcgaagattggcaaaagctgaagcatttggagcgcgtgatcgcggttgtcagcagaaatacggagcatatgccggcagatgcgggcaagcccgtattccatgcggacgatcctgctgccattatgtttgtgctttcgcagctgaaaggggaaactgcttaaatggaacgttttcaaattacaagggaacctatcattgcggaaaatatcgtaaaaaaagttgaaaagcgtgaagccggggccatcacaacgtttatcggcacggtcagagagtggactgcaggacggcggacggtgcgtctcgaatatgaagcgtatgaaccgatggctgttcaaatgctttctcaaatcggcagtgaaatcagcgcgaaatgggaaggagccgaagctgcaatcactcaccgtgtcggcgtccttgatatcggtgaagcagcggtcgtaatcgctgtgtcttctccgcacagaaaggcggcatatgaggcgaatgaatatgcaattgaacggataaaacagattgtgccgatatggaaaaaagaaatctgggaagacggggaagaatggataggcgatcagctggaaacaacgccctatccgaacggaaaaccggatttggataaaggggaatcgcgatgattaaagtattattatttgccgggcttgcggagcaggcgggaacaccggtcattgaacttgacgaaaaagagacggcagcgtctgctgtaaaaacgctgttaaaggaacggtacggccttcagacgattgacaatgccatgatcgcaatcaatgaaacatatgtaaaagacaacagcaccgtaacagaaggtgataccattgcctttatccctcctgtaagcggagggtgaaaaaagagccggatgtgcatcattgccatccggcttttttgtttataggcgctgaatttcagagaatatctaaatgggatttaaagggttttgcaattgaggcggttttcactgcatgaataggctgataacagtgcctttacaaggttttgagttacccgtcataccggtctgacgatgcttttttttacataattatggaacgtaaagctgagaatttgtgttacaatttagcataaatacgcaaacggcaaaaaaattgaaacttctctcagcctaaagcgtacgtataaacagaataatacataggaggcatcagctatatggaaccaaacctggaaaaaagcaatgcggcagtcacggaaaagccgtcaattttcggcgtcattacaagtcctgttgtgcagtttaaaagattaaaagaaaagccggtcatcggcatacctctcctgattgtcatcattctcatcgcggccggcagtattttgcgcggactggggatgaattatgaagaagtgctgaacagctcatctcttgacggtttgacggatgatcagattgaaatgaccaaaaccttcgctaaattcggcacgatgttcggaggaatcttcgggggcattatcgctctgtttatcgttccgctcatttactggctgtgcgtcaaaatgtcaggcggcgtgacaacttacaaaaaaatgctctcactcagcctgtttacggcgtttattaccaatatcggcttagttattaacggtcttgtcacttattttaccggtgcgggctcattgtacgccgttacatctttggcgagtgtcataccggccggagacggcgtcgcggtctttttaagcgcgttcgacattttcagcatctggagctatattctgctggctttgggacttcgctatacaggcggcatttcgaaaaaagcggcctggacttccgcgattgtcctgtttgttattatgcttttggtttcggcagtcggaggactgttaagttcagtgacagcaggtgtataacatgaaaaaaatttggatcggaatcggcatcgccgtaattgttgcagtatttatcggtatcaatatttataagtctgccgctcccgcgggcggcagcgccggaaaaaaaatcgaaaccggaaccatggaaaacagagaaatctcatctacggttatggttccgggaacacttaaattttctaaagaacagtatgttttttatgaagcagataaaggaactcttgataaagtgaaagtaaaagaaggcgacaaagtaaaaaaagggtcgtcgttagtcacgtatacaaatgagcagctcaaccttgataaagaacaaaatgagttgacagaacaatcaaaacggatgcaaatcgaacaagttgaagaaaaactcagagcattaaacagcaaggaacaagatctggcaaaacaagtgggagaagcggaagccaaaaaacaaattgaatccgaacggactgatctgcagcttcagcaaaaaacggcggaaatcgaattaaagcaatctgatttgcaaaagcagtctcttgaaaatcaagtgtcgaatctcaatgttaagagtgagatggacgggacggttatctcggtaaatcaagaagcggcttctaaaaaatcggatattcaagaaccggttatacatataggagacccggaacacctggtcgttgccggcaatttgtccgaatacgacacgctgaaagtgaaaaagggccaaagcgttacaatcacctcagacgccatccccggtaaaacgtggaaagggagagtggcggctgtcggcctcgttccggatcaaaagtcaagcgctgcttcgggggaaagcacggaacaagccgtccagtatccgtttcaggttaagctgatcggaaaccttccggaaggcaagccgggatttaaattaattatgaacattgaaaccgacaaacggaaagccgacacgctgccgtcctccgcagtcaaaaaagacggagatgagcactgggtctttacggtaaaagacgggaaggccaaacgcgtgaaagttaaagtcggcgataccgcaaatcagcttacggagataaaagaggggctttcaaaggatgataaagtcattctgaatccggctgacggtttgactgacggaacggatgtgaaagcatagatgattcagctttcaaaggtgaaaaaaagctatcagatcggcaaggagacgtttgatgttctccgttcaatcgacctgacgattgaagaaggagaatatgtgtcaattatgggaccctcgggatcgggaaaatctacgatcatgaatatcatcggctgtctggacagaccgacgtccggcaattacagtcttgcgggcgaagatgtttcttcatgcaccgaaaaagagcttgcggcggtccggaacaaatcaatcggttttgtctttcagcagtttcagctgctgccgcgattgaatgcaagaaaaaatgtcgaacttcccatgatctacgccggtatcggcaaaaaagagcgtgaggaacgggctgagcacgcgctggaaaaagtcggtttggcggatcggatgcgtcacatgccgaatgagctgtccggcggccagaagcagcgtgtcgcgattgcaagagccatcgtgaacgaaccgaagctcattttagctgatgaaccgaccggcgcgctggatacgaaaacaagcatttccattatggagcagttcacagagcttaatgcagagggcgtgaccgtggttcttgtcactcatgagcctgaagtggcggactgtacaaacagagtgattttcgtccgtgacggcatgatcgtttcccgcgattctgagcagaggagagtgggggaatgagcctgtcagaaaatctccggatggccctcagttccgtaagagctcacaagctgagatcgattctgacaatgctcggaatcattatcggcgtcggttcagtaatcgttgttgtggctgtcggccagggcggagagcaaatgctgaagcaatccatcagcgggccgggcaatacgattgaattgttttacatgcccagtgatgaagaattaacagccaatccgaacgccttacagcaagcgagttttacagaagaagatattaatggattaaaaggagtggacggcgtaaagcaggttgtcgcttccgcggtaaaatccatgacggcccgttaccatgaagaagacacggatattacgctgaacggcattaacagcggctacttggacgtaaaaaagctggacgttcaagatggacggacgtttacggacaatgattttctttccgggaaaagagcgggaatcatctcgaaaaaaatggctgaaaagctgttcgggaaaacgtctccgctcgggaaaatcgtctgggccggcggacagcccgtagaagtaatcggcgtactgaaagaagagagcggctttttatcgttaggactcagtgaaatgtatgtgccgttcaacatgctgaaaacgtctttcggtactaacgactacagcaacgtttccgttcagacggagtccgctgatcaaatcaaaacaacaggaaaagaagcggcccgtctcttaaatgacaatcacggtacaaaagaggcctatcaagtcatgaatatggaagaaatcgcggcgggaatcggtcaggtcacgaccgttatgacgacgatcatcggttcgatcgccggtatttctctcgttgtcggcgggatcggggtcatgaatattatgctcgtatcagtgacggaacggacaagagaaatcggcatccgcaaatcgctcggtgccacgagaggacagattctgacacaattcttaattgaatctgttgtgcttactttaatcggcggcttaatcggaatcggtctcggctacgggggagcaacactcgtttcccttatcgcaggctggccgtcgctcgtttcctggcaggtggtttgtatcggcgtgctgttcagtatgctgattggcgtcatcttcggcatgctgcccgccaacaaagcatcacgcttagatccgattgaagcgttacggtatgaataaccggcgccccatgcagtctgcatggggttttttgtgttttaatgattgaatgaatataatagacttttttcatttatgataaaaagaaaatgtcatacaattgtcccctttttgtcgaatttacagtttacaaaccctatgtacatacgttaatatgaacaaatgtgaaagattttgatagttattgaatgaatttgagtgattttagttgcttgaagtaaaaaaagcgtttacaattatcttgcagccgaaatgaatacgttttcaaaggaggcggaatatgctcactcctgaaaggtatcagctgattatggatcagattgaaaagcgagatgtggtgaagattcaagagctgataagcatgacaaacgcttctgaatcaacgatcagaagagatttatcaacacttgaagagcgcggatttttaaagcgcgttcacggcggggcgtctaaactttccaacagcaggcaagaacccgatatgcttgaaaaatcctccaaaaaccttcaggataaactgaagatcgctgaagaagcggcatctttattagaagaaggtgactgtatttaccttgatgcgggaacaactacattgcacatgattgattttatagatcatacaaaggacattgtggttgtcacaaacggggttatgcatatcgatgctttaataaggaaggggattcctttttatcttctcggaggatatgtgaagcatagaacaggtgcgatgatcggcggcgcctcattaacggcggtcagccagtaccgttttgacaaaagctttctcggggtgaacggcgtgcacattgaagccggctttacaacacccgatccggatgaggctcttctgaagacaaaggctgtgagacaggcgaaaaatgcgtatgttttagccgatccttctaaattcggcgagatttctttcgcagcgttcgccgccttgggcgatgcagctatcattaccactgaagctgaagaacttgcattcgatgattaccaagaaaaaactgtcgtaaaggtagtgaaaccatgatttacactgtaactctcaatccgtctgttgactatatcgttcacgttgaagattttgccgtaggcggtttaaaccgttccagctatgacacgaagtatcccggcggaaaaggcatcaacgtttcgagattactgaaaagacaccatgtgccgtcaaaagcattggggtttgtcggcggatttaccggaaattatatcacgtcatttttgcagcaggaaggtctggaaacggctttttctgaggtggatgaagacacgcgtataaatgtaaaactgaaaacgggcgatgaaacggaaattaacggacagggcccgacgatttcagacgaagtgttcaatgcctttttagaacagttctccgctctggaagagggagacatcgtcgttttagcgggaagcatcccttcttccctgccgcataacacgtatgaaaaaattgctgaggcatgcagaaagcagaatgcccgggtagtggtggacatctccggtgaagcgctgatgaaagcgacagaaatgaaaccgtttttgatgaagccgaatcatcatgagcttggggaaatgttcaatacggtcattgattcagccgaagctgccgttccttacggtaaaaaattaattgaacaaggcgctgaacacgcgattgtttcgatggctggcgacggtgcgcttttatttacgaaagaggcggttttcctcgccaatgttcctaaaggaaagcttgtcaattcggtaggcgcaggtgattccgtcgtcgcgggattccttgcgggaatttcaaaacagctgcctttggaagatgcgttccgtttaggagttgcttccggaagcgcgacggcattttctgaagaactcggaactgaagagtttgtacagcagcttcttcctgaagttaaagtcacacgtctatagaggaggaaagaaaagtgaagataactgagctgttaacaagagatacaattcatctcaatatagaaagcaaagagaaagaaaacgttatcgatgaaatggtgacagtgcttgacaaagccggcagattaaatgacagagaggcttacaaagcagccattttaaatcgtgaaagccaaagctcgacgggaatcggcgaaggtattgccattcctcacgcgaagacggcgagcgtcattaacccggccattgcattcggccgttcaaaagatggtgtggattatgaatcattagacggtcagccggcacacttggtctttatgattgcggcaaccgaaggagcgaacaatacgcaccttgaggcattatcaagactttcaacgcttcttatgcgtgaggaaatccgcaaacagcttcttgaagctgaatcagaagatgcgatcattgacatcatcaatcagcatgacaaagatgacgatgaggaagaagaagagcaggaagaacaggcagcgccgtcaggaaaagggaaaatccttgcggttacggcatgcccgacaggtatcgctcatacgttcatggcagctgacgcactgaaagaaaaagcgaaagagctcggcgttgacattaaagtcgagacaaacggctcaagcggtattaaacataagctgacggctcaagaaattgaagacgcgcctgcgattatcgtggcggctgataaacaggttgaaatggagcgctttaaaggcaaacatgttcttcaagtgcctgtgacggccggtatcagacgtccacaggaactgattgaaaaagccgttaaccaagatgcgccgatttacgagggcagcggcggaggatcttccgcttcaaatgaagacggtccgaaacagaaatcaggcacaagcatcggaagtactttctataaacacttaatgagcggtgtcagcaacatgctgccatttgtcgtcggcggcggaattctcgttgcgatttcattcttctggggaattcattcagctgatccgaaagacccgacatacaacacgtttgctgcagcgctgaactttatcggtgacggtaatgcgttaaagctgattgttgcagtacttgccggattcatcgcaatgagtattgcggaccgtccgggatttgcgccgggtatggtcggcggatttatggctacgcaggcgaatgccggattcttgggcggactgattgcgggattcttagccggttatgtcgtagtccttttgaaaaagctgtttgtctttattcctcagactcttgacggattaaaacctgtattgatttatccgctgctcggtatttttatcaccggtgtcctgatgcagtttgtcattaacacacctgtagcagcgtttatgaatttcttaacaaattggcttgaaagccttggaactggaaaccttgtcttaatgggtattattttaggcggtatgatggctatcgacatgggcggcccgctcaataaagcggcgttcactttcggtatcgcgatgatcgatgccggaaactatgcgccgcatgcggccatcatggcgggcggaatggctccgccgcttggaatcgcactggcgacaacattctttaaacacaaattctctaaacgtgaccgtgaagccggtattacgtgctacttcatgggagcagctttcgttacagaaggcgccatcccgtttgcagcggctgatccgcttcgcgtcatccctgcagccgttgtcggttctgcggtagcgggcggactgacagagtttttccgggtaacgcttcctgcaccgcacggagggatattcgttgcattcattacgaaccatccgctgctttacttaatgagcatcgtgatcggagcgattgtaacggcggttatcttgggaatcatcaaaaaaccggtagtagagaaataagcgaaaagcgtcctttacgggcgcttttttcaatcatatacgcatagaagcgttatgtattttgtgatgagttgtgataaagtaaagatggtacatgaaccgaaacagtgatcgtctaggaggaaccacgttgactgaagaacaaaaacctacttctgaaaaatcggtaaaaagaaaatccaacacgtattgggaatggggaaaggccatcattatagcggttgcacttgcgctgttaatccgccatttcctgtttgaaccgtacttagtggaaggatcatcaatgtacccgacattacatgacggtgaaagactgtttgtcaacaaaagcgtcaattatatcggagaaatcgagcggggggacatcgtcattattaacggcgatacatcgaaagtccattatgtaaagcggctcatcggaaaaccgggagaaacggtggaaatgaaaaatgacacgctttacataaacggcaaaaaaatcgcagaaccgtacctcgcgagcaataaaaaagaagcgaaaaaactgggagtcaacctgacgggagatttcggccccgtaaaggttccgaaaggcaaatactttgtcatgggcgacaatcggctgaactcaatggacagccggaacggcctcggcttaattgccgaaaaccggatcgtcggcacctcgaagtttgtgttcttcccgtttcatgatatgcgtcagacaaaataaaaacgccgcgctgcccgattcggacagcaggcgtttttatttggcaaacgaggccgcgacggcgatgaacaataccgtggccagcactgatccgacaatggccagaacgctgaaaaaaagattcacctgcttcttctctttgccgcgtctttcaagcatccgtttggaaaagagatgcgaaaacgtataaatgagggcgattccgacgtacaagccgatgtcacgtgccgtaaagcctgtgacggccagaaaaaccccggtgaagaaaatcataagacagtattctgtgagtgttaaaagcttcaacttgttcctccgtgatgaatatgtatatatatctattgtatcacagcgctccgggtttgacgcctgcatcttttcaaacccgtatattcgcagggaaacatttctcttcccctttattcatggtatacttttaatgatgatagacacgatggaggattctaaatgattgctgtaaataatgtgagcttgcgttttgcggatcgcaagttatttgaagatgtcaatattaaatttacgccgggcaactgctacggattaataggcgcaaacggtgccggaaaatcaacatttttgaaaattttatccggtgagctggagcctcagaccggcgatgtccatatgagtccgggcgaacgtcttgccattctgaagcagaaccactttgaatatgaagactgcgaagtgctgaaagtcgtcattatgggacataaacgtttatacgaagtcatgcaggaaaaagacgcgatttatatgaagcctgatttttcagatgaagacggcatccgcgccgctgagcttgaaggagagtttgcggaattaaacggatgggaagctgaaagtgaagccgctattttgttaaaggggctgggcatctctgaagacctgcatacgaagaaaatggccgacttaggcggttcagaaaaggtgaaagtgcttttggcacaggcgctgttcggcaagccggacgttctgctgcttgatgaaccgaccaaccacttggatctgaaagcgattcagtggctggaagagtttttaatcaactttgagaacacagttatcgtcgtatcccatgaccgtcactttttaaataaagtgtgcacgcacatcgccgatcttgattttaataaaattcaagtgtacgtcggcaactatgatttctggtatgaatcaagccagcttgctttaaagctttctcaggaagccaacaagaaaaaagaagagcagattaaacagcttcaggagttcgtggccagattcagcgccaacgcctctaaatcaaagcaggcgacatcaagaaagaaactccttgataaaatcacgcttgatgatatcaaaccgtcatcacgccgttatccttatgtcaatttcacgccggaacgcgagatcggaaatgacgtgctgcgggttgaaggcttaacaaaaacgattgacggggttaaggtgcttgataacgtcagctttattatgaacagagaagacaaaatcgcatttacgggccgcaacgaacttgccgttacgacattgtttaaaatcatttccggggaaatggaagcagacagcggcacatttaaatggggcgtgaccacttctcaggcgtacttccctaaagacaacagcgaatattttgacggcagcgatgcgaaccttgtcgactggctccgccaatactcgccgcatgaccaaagcgaaagctttctgcgcggtttcttaggacgcatgctgttctcaggagaagaagtcaacaaaaaatcaaacgtcctttccggaggagaaaaagtacgctgcatgctttcaaaagcgatgctttccggcgcgaatatcttaattctggatgaaccgacaaaccacttagatttggaatccattacagcgcttaacaacggcttaatcagctttaaaggcgctatgctgttttcatctcatgaccatcagtttgtacagacaattgccaatcgcatcattgaattaacgcctaaaggcattgttgacaaacaaatgtcttatgacgaatttcttgaaaacgcggatgtgcagaaaaagcttgaagagctatacgcgtaataaagaagcaggggagactctgcttttttatttatgaaaaaagttttcaatcttctgacttcccattacaataaaggaatacataaattgaaaagagacggaggaatgcatcatgaagtttttagttgtcggagctgggggagtgggcggatatatcggcgcgcgtcttgcagaaaagggaaatgacgttacatttctcgtccgcaagaaacgggcggaacaattacaagaaacgggtttgaccgtcaaaagtgcaaaaggtgatgtttcaatcaagccgaaattaatgttggcgggcgaagaaggagcatttgacgccgttatcatcgcttcaaaagcgtattctttgcaggacgtcattcgggatgtcaaaccgtttgtcaagccttcgtcggtcattattccttttttaaacggatacaggcactataaccagctgtttgaagctttttcaaaacggcaggtgctgggcggcctctgctttattgagagcgcccttaacgacaaaggggaaattcttcatacgagcgctgcccaccgttttgttttcggtgaatggaacggggagcgcacagaacgtatgaatgagctggaaaacgcatttgcaggcgtgaaagcggatgtcatcatcagcggggatattgaaaaggacatttggaaaaaatatatgtttattgccgcgcaggcgggagtgaccactctgtttcaacagccggtcggaccgattttagaaacagaaggcggccgcagcacggcaaagcgcctctttgctgaaatcggagccattttcaaggctgccggcatcccgaaagatcctggtctggaagaagagagttatcgcacattgacaagcatgtcttaccatatgaaatcgtcgatgctgagagatatggaaaagggcagggtgacggaaggtgatcatttacacggctttttgcttgagaaagcgaaaggcttgtcaattgatacacctgttttggaaaccgtcttcgccaacttgcaaatgtatgaagcgaaataaaaaggaggcctgatcgcctccttttttttattaaaatgcccagtttccgtttctgaagatcggttctcttttgccgtccgcggtaatgccgtcgatattcatttctttggaaccgaccataaaatctacgtgtgtaatgctttcatttaagccctctttgacaagctcttcccgtgtcatttgtttgccgccctcaatattaaaggcatacgcactgccgatcgccaagtggttagaggcgttttcatcgtacagtgtgttgtaaaataaaatatttgattgtgaaatcggtgaatcgtacggcactaaggccacttcaccgagatagtgtgagccttcatcggtttcgacgatgccttttaaaatctcctcgcctttttcagctttcacatcgacaatgcgcccgttttcaaaggtaagagtgaagttatcaataatgttgccgccgtagctaagcggtttcgtgctggaaaccgtgccgttcaccccgtcacgctgcggaagggtgaaaacctcttctgtcggcatgttggccatgaattcgtgcccgctttcattcacgcttcccgcgcctgcccatacatgttttttcggcagttcaatggttaagtctgttccttcagcctgataatgcagggcgctgtaatgttttttgttcaggtgttccactttttcatgaagattttgatcgtgttttttccatgctgccacagggttttcttcatttacgcgggttgttttgaaaatttcttcccataaaagctgaacggctgtttcttccggctgatccgggaacacttttttcgcccagcctgttgaagccgctccgatcaccgtccagctgaccttatctgattgaatatattgtctgtatgtatgcaatgcttttccggcggctttttggaacgctgcaatccgtttgccgtcagcgccttttaacaggtcggggtcggatgagacgacagaaataaacgcagccccttttttcgcgagctcttcttttccttttgcttcccattcaggatactcttcaaacgcttcaaaaggtgccatctcgtattttaatctggacagttcatcgtcctgccaatttacggtgacgttttttgcgcctttttcataagaatgtttggcaagcagtctgacaagttcccggacatcagttgaggcattgattacgacatgctgtcctttttggacattgacgccgacttctaccgccagctgagcatatgtatttaacttttcagtaaacgaactcatcgttcattcctcctcatcggtttttctcatcatatcaaatatcgcctcataaaggaaaggaaggagcacaaacgaaaaagacacagcttttgctgcgtctttacggatgattcagttttacggcgccgccggccggagaatggggcatattggccagtgaaatgctcataccccccaaaataattccgcttaaaatgacggctactgctacgcgtcttcccacatctctaagcatatgcttcctccttaatgtttctccagttctcacaatatgagccggccggagaaaaaagaagcacaatcttattatttaatcgctttttgcagcttgtcgatgacgtctaatgaacgtccagtgccgatagccactgattcaagcggatttgccgccaaatgaacgggaacgacgatttcatctgtcagccattctttcatcccgtttaaaagggagcctccgccggttaacacgacgccgcggtcaacgatatcaccgctgagctccggcggacaatcttcaagcgtcgctctgatcgcttcaagaatatgcaggagcgactcacgcatcgcgtgctgaatttcattagactgcagtctgattgtcttcggcagaccggttacgaggtcacgcccgcggatttccatcgtttccggcacatgttcgatcaatgcaaatccgatttccattttcacttgttctgccgtgcgttccccgatcagcaggttgtatttttttctgacgaacgaggcgatatcttcatcaagctggtcgccgccgattctgatcgagtggcaggatacgacgcccccgaatgagatgatggcgacttcagtcgtaccgccgccgatatctacgacgacgtttgcgaccggctcgtcaacagggaggtcggccccgattgcagcggctacgggttcttcaatcaagtgaacgtttttcgctccgcagtttttgacagcgtcactgatggcgcggcgttcaacggccgttgagcctgaaggcgtgcagacgacgacattcggtttgcggaaggtcattccgattttttttccggcttttttcataatgtgttttaataagtcagttgtcatatcataatcagcaatgacaccgtctttcatcggccgtacggcgacgattttccccggcgtctttccgatcatgcttttggcatccgttccgatggcaagcaccgctttcgttgttgtatctacagcgacaacggaaggctcatttaaaataattcctttatttttactgtaaacaagtatattagcggttcctaagtcgattccgatctcagttgattgaaacatgttttcacccaatccctatcctgatttaattgattctacatttaaagtttctgagaaaaaccacgatttttgggggtttccgccgggaatgaaatgtttttgtaaaaaaggagggaaagtctgtatcccgtatttcaaaaggctttcttttgtaaaaaacattcatttccggatgctgagaaacttttgctccgttcctttcgtctacgtttatgaaggattttccttggacataaagaagagacattaaaggaagtaggggatttctatgaaatcaattggtgtagtaagaaaagtagacgaactcgggcgtattgtcatgccgattgaattgcgaagagcattggatatcgctattaaagatagtattgaatttttcgttgacggagacaaaattgtcttaaaaaaatacaagccgcacggcatttgcttgatgaccggggaaattacctccgaaaatcaggagtacggcaacggcaaaattattttaagtcctgaaggagcgaaaatgctgcttgaggaaatcgaagaagcgttaaaagatagatcataatcagcaaaaagggcggggcatcattccgtccttttattatgaacttgtgcaaaaactcacgggaaaagtaagcgaacctgctcaattaattgggaatagttatcattttttagtcaataatgcagtcaacaatgttacaatatatgtagaaatgttagcggcaggtgggactatgggaaaatatcaagcgcgtatcatttccttaatcttggcaatgatttttattatgttttgggattatttattttatatgattgaacggaatccgattaactggcccgttgacatcacctttaccgccgtcacattaatcagcgtctggctgctggcttattatgtggacaataaaaagcagctgctggcggagctgaaggacagcgagcagaaagcaaaggcgctttcagatgagaaaaaccggatcatggacaatctgcaggaaatcgtttttcagacggattcacaagggaatattacatatttgaatcaggcctggacgacgattacgggccactccatcagcgaatgtatgggcacgatgtataatgattattttataaaagaaaaacatatcattgattatattatctcccaaatcaagcagcagtccccgtcaggaatgtttacggccaaatatattaaaagagacggcacgatcttttggggagaagtccattataagctgtattatgaccgcagacagaaatttgtcgggagcctggggacgatgtctgatatcagtgaacggaaaaaagcggtcgacgagcttctggaaacgaacgaacgccttgccatgcaatctcaaaagctggccattgccggggagcttgcggcaggaatcgcccatgaagtaagaaatcctttaacgtcagtcagcggctttctccagctgatgaaagcccagtatccggaaagaacggattatttcgatattattttttcggagattaaaaggattgatctcgtgctgggggagctgcttctgctcgccaagccgcagaccgtgacgtttaccgctcatcatctcaaccatattttaaggcaggtggcgacgcttcttgacacgaacgcggtgctgtcgaacactgtgattgagaaggatttcaggcagactgagtcctgtatggtcaacggtgacgaaaaccagctgaaacaggtatttatcaatattattaaaaatgcgattgaagcgatgcctgacggcgggaatattcatatttatacagaacgggatgaagaatacgcggtgatcagcatacaggatgaaggaaacggcatgtcgaaagaaaagcttgaaaatatcgggaaaccgtttttctccacaaaagatcagggaacgggtctcgggcttccgatttgtttacgaattctgaaggagcataatggtaaacttaacattaagagcaaaaatggagaaggcagtacgtttcaggtgattctgccgttagaagcggctgctgtccaaaaggaggaaaaataacttgcttctttttgtatacggtttgttacggaagcgtgaagaaaaccatgaactgctgaaaggcgctctatgtgtgtgcgagcaggccgcgataaacggtgtgctgtacgaaacggataaaggtcagcctgcggcgtctttagcagaaacagcttttgtgtacggggaattgtatgaaacagatcatcagatgatccgtaagctggatatgtattatgctgattttgaccggaaagaggttgccgtgacgacggatgccgggaataaaaccgccttcgcatatgtcgtaaagcccggccagtgtgcctcattcagccgtatcaaaagcggagactggaaagaataccgttttatgaaacgggaggatgacagtccggtttattatttcgcttacggctcctgtatggacaatgcccggtttaaacaggcgggggtcgaccacttctttgccgagccggtcggaggggcggttgttgaagggtattcgacgagattcacgttaaggcgtcctgacggttccagagccgatcttgttgaagacgggggacgaactgaaggcgtgctgtacaagctcccgtttgaagcggcaacctatctgtacaaaagagaaggtgttgataatcacacataccgtcccgcgttcatagaagtgtgtgccggcggccgtgtatacagaggcgtcctgacgtttctggttcttgataaagcggaggaaattgcgcctccgggtcactatcaggaagaaatcgaacgcggagcggacctgtatttatcacccgccttttcagaaaagcttaaacgctatatgaactcattgccgaaaatgtgatactattcctattagagatattgtttaaaggagtactgttatgagaaaagagtttgccgttatcggtctcggacgcttcggcggaagtatttgcaaagcattaagtgaagaaggccttgaggtcatggcgatggatattgatgaagataaagtaaatgaatacgccaaaatcgcatcacacgcggtcatcggcgattcaaccgatgaatcggtgctgaaaaacttggggctgcgcaactttgaccacgtcattgtggcaatcggcgaaaatatacaggcgagcattttaacgacgctgatcttaaaggaactcggcgtgaacacgatcacggttaaagcgcagaacgattatcatgagaaagtacttgcgaaaatcggggccgatcacatcgtccaccctgaacgtgacatggcaaaacgcatcgcccacaacatcgtatcaaataatgtgcttgattatttggagctgtccgacgaacacagcattgtggagatcgtggccaacagcaggcttgcgggcaacacactgcttgatctggacatccgggcgaagtacggcattaatatcgtggccatcaagagagaaaaagaagtgatcgtatctccgctggcgactgaaatgatccaaaaagaagatattctcatcgttatcggctctcttacggacatttcccgatttgaaaaaagagtgcttcatacaaagtgaaaagccgtccgtaaaaggacggtcttttattatgtcagaatagaaagacatttatcatgtaagcggtatattctgcaatttttattgactatgatcaggcgatccgatagcatattgtaccatataaagaaaaagaggaggccgcattttgaacaaagaaacactggctgaacggctgaatgcatcagccggcagacaaaaagccgataccgtcattaaaaacggaaaaatcatggatgtatttaaccaggaatggatttctgcagatatcgccattacgggcggagtgatcgtcgggctgggcgaatatgaaggggaagaagtcattgatgcagaaggccaaatgatcgttccgggctttattgacggacatgttcatatcgagtcctctatggttactccgattgaatttgctaaagccgtcctccctcacggagtgactactgtcattactgatcctcacgaaattgcgaacgtttccggagcaaaaggcatttcatttatgatagagcaggcgaaaaaggcgccgctgaacatccgtttcatgcttccttcctgtgttcccgccgctagctttgaacgctcaggagctgtattaaaagccgaggatttaaagcctttttatcaggagaaagaggtgctcgggcttgcggaagtaatggattatgtgtctgttgcggaaggtgaagaggatatgcttcagaaactgcttgatgccaagcgtcacggaaagcggatcgacgggcatttagccggactgtcttcagatatcatcaatatatacagaaccgcaatggtgtcaaatgatcatgaagtgacgacaaaagaagaagcgctggacagaatcagacggggaatgtacgtcatgctgcgcgaaggatcggtggcaaaaaatacgctcaacgtgctgccggcggtgaatgaaaaaaacgcgcgccgctttttcttttgtacggatgataagcatgtagatgatctgcttacagaaggaagtgtgaaccaccaagtcaaaatggcgataaaggcgggacttgatccattccttgcgtatcagctcgccagcttaaatgcggctgagtgctacggccttgaaacaaaaggggcggtagcgccgggttttgacgcagatctgctgttcatttcagatgtacgggaggctgccgtcacgaagaccatggtcgccggccggaccgttgccgagaacggacggacggtttatgaacagtctgccggttcctattcgccggaccaggcactgttggatacagtgcggctgaaagcgccgctgactgaatcggattttcatataccgattcaagagggcaggaaaatgaatgtaatcgaaatgataccgaatcatttggagacgagaaaaaaagaagtgcctgcaccgtctgctgacgcgtttcgacctgatacagataatgatttattaaaaatcgccgtcgcagagcggcacagcggcgaaaaaatgataggactcgggattgtacaagggttcgggttaaaagaaggcgccatcgccacaaccatttctcacgattcccataatatcatcgccgtcggtacaaacgatgccgatttggcaaaagcaatcaacaagctccgtgacaccgggggcggattaacagccgtgaaaaacggagaattgcttcactccgttccgcttccgatcgccgggcttttgtctgataagtcggcggaatgggttaatgacagcttgggcgtgcttcatgaaaagcttcctctgcttggattcaccggtgatttcaatccgtttctcaccttatcgtttttagcccttccggtgattccggatattaaaatgacggcggccggtctgtttgatgtcaaagcctttcagcatattccgctgcaataaaaaaactgcactcgtaatgagtgcagtttttttagacctccataatgatcggaaggatcatcgggcggcgttttgttttttcgtataggaacggagcaagcgtatcggtaatttcgtttttaatttcggaccactgcgttgttttccgatccattactttctccagatggtttgaaatgagctgctgcgcgtcattgatcaaatcaccggattctctcatatatacaaaacctcttgagattaaatcaggtcccgccgaaaccttaaagtcgtccatattgatgctgacaacaacgataacaaggccttcttctgaaagaatgcgacggtcgcggagcacgatattgccgatatcaccgattccgcttccgtcaatgtaaacggagcctgacggaattttgcctgccacagcggcttcttcgcctttgagggccagcacttcgccattatccatgataaaacagttttcttcaggtatgccgcaatcagtcgcgagtttgacgtgcattttctgcattctgtactcaccgtgaatcggcataaagaacttcggtttgatcaggcggagcattaatttctgctcttcctgtccgccgtgtccggatgtatgaatgtcattcaatgaaccgtgaatgacttctgcgcccgcacggtacagctggttgatggtgcggcttacgctgattgtgtttccgggtatcggagaggaagaaaagacgaccgtatctccgggattaatggaaatctgccggtgcgtcccgttagcgatgcgtgataacgccgccatcggttcaccttggctccccgtacataaaatcgttaccttattggcaggcatacgattgatttcgttatgctcaataaacgtatttttaggacaggtaatgtaaccgagattttgtccgatttcaatagccgattccatactgcgtccgaatacggcaacttttctgccgtttaaaacggctgcttcaatcacctgctgaagacggtgtatattcgaagcgaatgtcgcaaatataattctgccgtccacttttcggaaaatatcgtgaatgctttcgcctacgcggcgttctgacatggtgaaatcaggcacctcactgtttgtactgtcagaaagcaggcacaaaacgccttctttcccgatttcagccatctttgtcaagttggccggttcgcctaccggtgtgaaatcgaacttaaagtccccggtatgtacgatattgcccggcggtgttttgacgacgattccgtatgaatccggaatgctgtgtgtcgttctgaagaaggatacagacgtcttgcggaacttcacgatgtcgtcttcaccgatgatgtttaatttggtctgtcttaacagcccgtgctcttcaagtttattccgaagtaagccgatcgcgagtttaccgccgtaaacgggaatatttacttgtctgagcaggtacggaataccgccgatatggtcttcatgaccgtgggtgataaacagacctttaattttatcttcattttttactaaatacgtgtaatcggggattacgtaatcaatgccgagaagttcatcttccgggaacttgattcccgcatcaatcagtacaatttcatcctgaaactgcaccccgtacgtatttttcccgatctcgcccaatccgccgagggcgaaaacggcagtctggtcattttttacaaatttcattccgctcataactccaatactttaaaattttcgctctgcttctcatattctaaaaaagcaccgtccacaggctgaacaaattcaatgttgtatttctgatctttcagtttcgttctgacgtcccgttctgaaacgccctcaatgtaaagtgaatctgttttttcccgaacaggtacttcgtcagccttctcttgataaaataccttataaatcatccaaatctctccttaaatgccgtatgttagactcgctgattctattatattcgaaaacggattataaggaaagtctcgagcaaaaaagggactttcaaaaaccgaaagatcccttctatgcgatgacttttttccggagcattccgccccactgtcttctgagtttcttccgtaatcggcgcagcatcgtatacctcctttaaagccctttatagcagtagtatgcggaaaaaatgaatttgttttcgtgggtaaaactggaatttcatcaaggcggttttccggaagaaaaactttctgtatgatgatattgaaaaagacacgactgataaacgggaaaaaggagaaattgacatgaaaccaaaactgatcttttttgatattgacggcacgatctatgaccatgataaacatattcccgatagcgcaagaaacgccgtgacggcgcttaaagaggctggacatcacgtttttatcgccagcggaaggtccccgtttatggtaaaaccgattctggaagagcttgagattgaatcatttatttcatacaacggccagtatgtcgtatttgaaggtgaggtcatttataaaaatccgcttcctgaagatgcggttgcgcgtttattaaagcaggcggcagaaggggagcaccccgtcgtatttatggcggaagacacgatgaaaacgaccgtccccggacatccgcacgtctcggaaggtatcggcagtctgaaagcgccttatcccgaagttgatgaaacattttataaaggaaaagaaatttatcagctgcttttattctgccgcggacatgaagaaaaagcatatgccgcttttccggagtttgattacgtccgctggcatgaattgtcaacggatgtgcttccgaaaggcggttcaaaagcggaaggcattaaaagagtgcttgagcggcttccgtacggcgtaagtgacacttatgcattcggcgacggactaaatgaccttgagatgatccgttttgccggcaccggggtggcgatgggaaatgcggttccggaattaaaagctgccgccgatttcgtcacaaagccggtggatgaagagggaatcagctgggccgtcaaagaactgggccttttgaaataaagaaaaccggcactttgggaagtgccggtttttttaacggtcaatggcaatggcgttttcaggttctttgaacggattttctttatcgatatgatcgtaaaacatcacgccgttcagatgatcgatttcgtgctgaaacacgatggccggaaaacctttgaggcggatgtcaatctgttctccttcaagcgtcaccgcctttacgcggatgcgggcgtagcgcggcacatagccgggaatgggttcgtctaccgacaggcagccttctccgctcgtcaagtagcttttttccactgagtggctgacgattttagggttaaaaagagcatagctgtataaagtgcctttcgcatcttctgcatggacggcgatcatccgtttttttacgtctgtttgcggagcggcaagaccgacgcccggacgaagcttgtatttctcggctaattcaggattttggctgtttttcacaaactcaatcatatcagcaagatgctgtttttcttcgtcggaagcgggaagctgaacctcttcagcgatctctctgagcgcgggatgtccgtcgcgtacaatattttccatagtaatcaagaaacttcactcctaaagcttaatatgtaaattatagcgaatttctttatcgcggcgcaacgaaacaattggccggccatagcaggccggccgattttcatggtgtataaggtcagcagccgcagcctaaataagcggcaccgacgatgattaataagataaacaatacgacgattaatgcgaatgtgcggccatatccgccgccgcagccataaccgtaaccgccataaccgtatccgccgcagcaaccgccgccaaatccgccgccaaatccgccgccaaatccatatccgtacataaaaaaacctcctcttttaattacgctgaccctttgtcagcagggccggcgtctactataaactatgtaaaagccaaaaagatgtatggtcatccgccctgttttctcaattttttacgcaagtattctttgacagcaccgtaagcatctttttacccggtcatgccaattacagctcagctattgtcaaaaagcgttcgggcttctatagtggaaattgtcaagattgggggattttaagtgaatatgattcaaaaaaaggtattagcaggaatcggagcgctcggcgccgcaagtatgctgcttgcgggctgcgggggaaaagatccggttgaatcgcttcatgactcgatggaaaaagccgttcaagcggaaaaaccgtttcaaaaagagcagaaaacattggaaaaattggagaaaaaagagcacaagctttacgacagcgcggttaaactgaatatggatgattacaagaaaatcgtcacactgtctgatcaggctctgagcaatgcaaatcagcgaaaaaaacatctgaaagcagaaaaagacagtattgatgattcaaaaaaagcatttgaatccgcaaaaaaaacttctcaagaaataaaggataagaaagtaaaagaaaaagccgggcatgctgtcgctttaatggaaaaaaggtatgcatcttatgatcttttgtacaaaaagtacgaaaaagccatttcacttgatcaggacctttataaactgattaaagataaaaagctcacattatcgcagctggaagagcaaatcggcaaagtaaactcagtttacgaaaaagtgcataaacaagcagatgagttcaatcaatttactaaagactacaacaaagagaaagaactattattccgcgaatagtatagtgaaggcatatcggcatgggctgatgaactgataacaaccgagttcagccgcctgtaaatggcggctgaagaattggtatatacgtgtgtttcccattgacaacatgtaaatcatggtatagtatttatttagggaaatattcacataaaaccaatcgttgtttcggcacgttgggatgtttttattatattgatatataaaaaacagaatgaaaatgcggttttaattatcagaaaattctatctattatttgcggcaatatgatctttgtacatgctttttgcttttaaacctttatccggcataaaggtttttttattttgcttcgtaatgcttattaagtaatggtgccgggtgcttagagtaaatgacaattttaaaaattgaagtgaaaaatgttaaacaaatcacaatcggaacgaaaagaaacggcagaaatacggaacaaggaggaaaacaaatgcttgcttacgtctttcccggacagggagcgcagtttaaaggaatgggcagagacttattcgatgaattcagtgagctcattaaaaaggcagatcatattttaggatactccataaaggatttatgcctttcagatgaaaaagagaggctcactgatacgaagtatacacaacctgcaatttatacagtgagcgcactgcaatatttaaagggtttaaaagaaggtcatactcgccctgatgctgttgcaggacatagtctgggtgaatatactgcgctttttgcggccggtgtttttaattttgaaacaggtctccggctggttgctaaaagaggcgagttaatgagtgaggcttccgagggcggaatggctgccgtgatcggactggatgagcatcacataaaaaaaatacttcaaaagtatgaattcggccaaatagatatcgccaattacaatacatcttcacaaattgtgatagcaggggctgcagaagagataaagcgtgcagcctctttttttgaaaaagaaggggcgaaagcttatatcgtattgcaagtcggcggagcttttcattctcgtttcatggaaagtgcacagcgtgaatttgcggaatttatcggggagtttcatttttctgaattgaatttcccggtcatctctaactatacggcaagaccttataaacaagaagatatcaaacggaatttaattgaacaaataacaaactcggtgaaatggactgaaagcatcaggtacttaatgggacaaggcgtcactgtgtttgaagagatcggtcccggaaacattctgactaaattaattcaaaccatacaaagagatgaggaaccgcttaatattagtgcgccaaaagacagtctcttgttttctgaagggaacaaggacaattccgaaagcgggaaagagaagggcctcatggccgaaaatatagaaagcgttgcggcttcaccggtgtcccgattgggtgatcaatctttcaaagaagattacggtttgacatacgcgtatttggcaggtgcgatgcatagagggatctcttccgctgaaatgctgatccgcctcgggaagaaaggaatgctggggttctttggcacagcgggtttaactataagggaaattgaacaggcccttatttctattaaggagacactcaaaaatggccagccctacggaatgaatctgcgatttgagccggatcatcaagatagagaaaaggaattgatagatttatatatcaagcatgacgtacgggtaatagaagcgtcttcgtatctttccgtcagcgcgccattaatttattacaaagcgcatcagttgaagatggacaaaagcggcagggtcatacctcataatcggatcattgccaaagtttcacggccggaagttgcggccgcatttctgagtccgcctccccaaagtatcgtaaagagaatgtgtcagcacggtatgctgacggaagagcaggcggagtggctcagccgtgttccgtcagcagacgatatcattattgaagcagattgcggcagtaataccgaacagggctcattgacggcgatgctgccgttttttgttaacctgcgggatgaaatgatggaaacacataaatacgcaaggaagatcagagtcggggccgcgggaggaatcggaactcccgagtctgcggcgtctgcttttttaatgggcgctgattttattatgacgggatccattaatcaatgtacagttgaagccgcaacaagcggttttgttaaagaaatgctgagtgagacagaaatatgcgatactgcttatgcgccttcggagactctgtttgagttcggaacaaaggttcaggtgctgaaaaagggcacgctgtttccggtcagggcaaataaattatttcaaatctaccaacaatatgagtctttgagtgagatagatgaagagacaaagattcagctcgaaaatgtttattttaataagacttttgatgaaatctacgaaagcataatagaaaaacagccgaacctggcccaaaaagcggagcgcaatcaaaaatataagatgctgttactatttaagtggtatttgcagagaggatgtctgcttgctttggaaggggaggaagaacaaaaggtgaatttccaagttcattgcggcccgtctttaggcgcttttaaccattgggtaaagggcacggagttggaatcatggagaaacagacatgtcgatgacattggtgaaaaaatgatgaatgagaccgaaagtctgctaagacgcagattggatacgttatttctacactaaaaaggggcgggtggaggccaatggttcatttgaataaacagagtgcggatatcgcgataatcggggttgcttgcagattccccgatgcagatcattatcatgaattctgggaaaacataaatagcggcaaagattccatccgggaagtgccgattgaacggtgggatcccgatctttattactcagctgatatcagtataccgaacaaaacaatcagcaagtggggaggttttattcataaagctgaccatttcgaccataagttttttaatatctctccccgggaagcgaaaaacatggatcctgagcaaagaatccttttagaagaaacttggcggtgcatcgaagattccggggtctctttgcgggatctccagcgtaaaaccacttctgtttttgcgggtattatgaattctgactaccggcagacaggtcatgaatcggaaatcgacagttacgcctgtttaggaagtttcgaagctatgctctccaaccggctttcatacacattcggtttgaccggaaaaagcatgtctgtaaatgccgcttgtgcatcgtcgcttgttgctttacatgaagcggttaagtcattgcggacaaaagaaagcgattatgcaattgcatcgggagtaaacttgaatttccaacccggaaaatatatttctttttctaaagccagaatgctgagtcctgacggcaaatgtaaaacctttgacgcagcggcgaacgggtacgttcccggagaaggggcaggcgttgtattgctgcagcgccttggtgatgcagtaaaagccggtcaccatatatacgggatcataaaagggacggctgttaatcatggcggtaaatcccgttccataaccgctcccagagcagaagcgcagtgccgggtcatctcagaagctttacacaacgctgctgttgatgctgcgacggtttcttatgtagaagcacatggtacaggtacatctctgggcgatccgatagaaatagaagcattgacaaaagcatatcggcaatatactgaggatactcaatattgcagaatcggaagtgtgaaaacaaatatcggtcatacagaagcagcggcgggaatggccggattgataaaagttctaatgatgatgaaacatcggagggtgccgaaaagcctgaatgtacatacggtaaatccaattatacagtttgaaaaaacaccgtttaggccggcgcttgattcaagtgattggaaggcggcagacggggctccgctcagggcgggaatcagctccttcggttttgggggtgttaactctcacgtcatcatcgaagaatttatacatacaaatgacgaaactgacagaaaggtaagggctcccttccttttttccgctaaaagtgaagaaagcatgaaacaaatgatacataattggagaaccttttctgacgattctgaggaattttgcaaaatatcaaatgaagcgatcagcagcacccttttaacaaggacatcgtttgattacagggcgggtttattggcaggcagcaaggaggaatttaaaaatcagcttaaagagggattaagttttcggaggaaacatgattctgaatgggcgcttgccatcggtgacttcaaatgggaaagttataaacaatttgccgttttgaaacgcgtgttccctgatctagaaaagaacgtaaggtcggtgctgaagggtataccagcattgcacagttcatttaaaagaaaatggacgcctgagaaaatccgcttgtattctttagttatcaatacggaaatcataaaaagtatcctggcatccggttttaagccaagtctcattacaggcgccggagacggatattacgtcgctcttgcagcagcggatatcatcaaaattgaaaaggccatttctgtcatcacaggcgctgaaaaaccttcgcacttatcctgcgagccgccgtccattccatttgtcaatccgtacacttcaaaaacgtacccgccggttcgattaaatgaagaatatgtaaggatgctgctgaacggtctgagcttcccggctgattttacagaccgcctgtacgggaaaacacggctgcttcttgagcaccaatatacgtttaaagggtttttagaagagtgggataaagcgggaaagactcaggaaatcgagattttatcttatattgtgaatcgcacggcggataaaagaaacgcattgccggctgaagaggaagcggcgatcatggctatccttgcctctatgagaagactgtataagagatgggatttaacagattatgatggattctttgataatgattatgttctggaaatattaaatttactggatgaaggaatcttgtctaaagaactttttctgagcatgttattgaaaaagcaagacggaattaaacaggctgttgcttgtatgaatgagcagccggcaggtttttatgataaggcccgttttccgctgatgacagaatacaatcagatggatgccgtgtttcaggagatagctgaccatatgccgcttcacacggaagaaaagggaacggagccggatgtgaatatctctgatttttcagtttttcaattcggatcgctccctccatcagcaaaactaaacaaagcggctgcttttgaagcggacaaaccagctgatgaggctctttatcattcatttatgcaaatgtggctttcaggagaagagattgaatgggcgaaactaggtgattatcataaaagaaaagccccgcttccgccttatccgtttgagcgctctcaattttctttaaaccctcagccggtaaaatcagacgcggctttttcagaaaagaagaatcaggcactttatacgccggtatggaaagaaaccgcacttgagaatgaagcgggcagcggacaagcctgtactattttgttgttctccgggaataaagactattttgaagagctgaaaaaaagagagaatacgtccgcatatcttattatgcccggtgaccgtttagagcagataagcgacagtgttttcaccatcaacaggcagtgtcccgaagattatcaaggtgtcattcgtctgttaaaggaaaaaggcgcagcgcccgatgcaattttgcatacttggtctgaaaaacagcctgaactggaagaaacactcgcatcaggaatttattctgtgttttatctgactaaggctttaatcagcgagaaccttataaacaaagtaacgttcatttatacattcagcgcagatcaaaaagaaaaattgccgtattttgaaggtgtgaacggttttttaaaatcggtaaaacaagagtacccgcagctgcattgtaagacggtttgctttgaacatgattctgcatccgtttcatgttcagagaaggctgacattctttataaagaaataaacacagcgcctgatcggcatattcatatcacttacagaggctgcgtaagatatgcacggatgttagagaagcagagagaaacaaacagaaagaccattcaataccctgaaaaagataaagtatatttaattacaggggatttggggggattggcagtaaaatcgctgaatattgcgcgaaaactgaaagatccaccattatcctatcggggcgatctgttttaaacggagataagcagaaacatttagaatacctgaacagctttaaagccaaggtttattatatacaggcgaatatatccgataaagaagcggtaaaaaaaatgattgacggtattaccgatcagcatgcaggtcttcatggcgtcattcattgtgcaggagttatcagagactcgctgctttttcgaaaaacaaagcatgaactttcagaggtgattgctccgaaagttcatggcgcattgaatcttgatcatgcaacgaagtcgctcgaattagattttttcgccgttttttcttcagtcgtctctattgcaggcaacgaaggtcagtgtgattatgcatatgcaaacggctttttagatcattttgccgaatatcgggaacagaaacggcaaaattctctgcgcagcggccgcaccctgacaatcaattggcctttatggcaagacatcggaatgggggcgaacctgtcaggtcaagggcggacgtctctttttcatggttcagggctcgaagaacttcctgctgaagacggaacgcaatggttttcgcggattgtaacttcgggtcagctgcataatattgcagtctgcggtgatcatgaacgctttgaacaatttatgcagcagagatttttgacggacgaaacagagacaggcagtgccgttcctttggctcaaggcgatattttggatcagacagttttgtttttaaccaatatcatctcctgtgaggtcggtgcagaacgggaagagatcgatcaagatgtgcatctggctgaatatggaatggattccgttatgattcatcaatgcaacacaaagctggagcagtcactgggagcaatttcgaaaacgcttttatttgaatttcatacaatcagagatttagcagatcatcttgtaaaagaatacccggatcggctgggacgtttattttcacgggaggaaaaaggaaaacagattcagagcattacccccgccaggccggaacaaaacaccactgcatctgcggcggaggaaaaagaacatcttgacgggatagcggtaatcggtatcagcggccgttatcccggggctgaaaatatcgaagaattgtgggatcttctatcaaaagagagaacctcaatcacagaaattccgaaagaacgatggaattatgagacctactatgatccagatcccgctaaagcgcatgaggggaaaatttattgcaaatggggcggatttttaaagaatgctgaatcatttgattctttgtttttccaaatatcgccgagagaagcagaagcgatggatcctcaggaacgaatatttctcgaaaccgtatggaaagcatttgaagattcgggatataccattgaagggttgagaaagcagaccgaaaaacatgtcggtgtatttgcgggagttacaaccaattcttacaagctgctcggcgaaagaataccgacggacaaaaacgatgtacttccaaattcgttcccgtggtctctcgcgaacagagtgtcttacacatttgattttacgggtcccagtatccctgtagatacggcttgctcttcatccttaacggcaattcacatggcttgccaaagtttaaaaaaaggtgagtgctcggttgcggttgcgggaggagtaaatttgtatcttcatccttctgactatttataccggtgtcagatgggaatgctttcaaaatcgggaaaatgcagaagttttggagaaggcggcgacggtttcgtgcccggagaaggtgtcggggccgttattcttaaaccgcttaaagatgccatacgtgataatgatactgtgtacgccgtcataaaaggaacggcaattaaccatggcggaaagacgaatggctatacggtgcctaatcctgccgcacaggcggatttaattcaaggagctcttaaagcggccggttggagcgccagaagtgtcagctttattgaagcacacggcacgggaacgccgctgggtgacccgattgaagtccgaggtctgaccaaggcgttcagagcttataccgaagatgtttcatattgctctctcggatcgattaaatctaacatcggtcatctcgaagcggccgcgggtattgccggcctgacaaagattattttacaaatgaagtataaaaaaatagccgcaacactgcatgctgaacgggtgcatccggatctttatctggaagagacacctttttgtctccagcaggaaactgccgactggataaaacccgcgaatgaaaaacattctgacagcaaatatccgcggcgtgcgggattaagttctttcggagcgggcggggcaaatgctcatattcttgtggaagagtatgagtctgctgctgactgtcaaacggggcgtgaggaaagtgaagaacttatcgtactctcagccaagcattcactgagtttacgggaatcagcaaaaaagctggaggaatatcttcaaaaggctcgtcataagcagggcgagtgtttacagccggcgggaacaaataagccgcttcacctttctgatattgcatatacccttcttgaagggcgggaagccatgccggaaaggcttgctgtcatttcgaaaaatatcgatgacctgatgttgaaattaaatcacttttataatggaattgacgatcacgaaatattcagagggaaaaaaccgaatcataaacgcggacagcggcaatcggatcttccgctcaattccggcagaaccacattagccgacatggctgaattctgggtatcgggagggagtttaagctgggaagatttccgcaccggcagaaaaccggcaaaaattgcgctgccgacttaccctttcttaaaaaacagactgtgggtgtcaaataaggcgcaaacaacatcagcagccggtacagctcctttatttgatttttctgccggtgagtgccgattttataaaacgctttcagattctgaatattatttaaaagaccatgttgtgcatgggaatatggttctgcccggagcggcaatcatcgaagcggccagagaagcgggagagaggctgtacggaaaatcagtcataaaactgagtcaggttgtatgggcggttccgataaccgttgaaaaagaaaagacgataatgatagatctgctgccgaatcaaaaagacggcagatttgtggtgaaaaccgatatgcaatctgaagcggcagttcattgccaaggaaacattatgacatgcggagataaagacgcctctcatacagagcattttaaattggacagctggttaaccggacagaaaagattaatcagcggcgctgagtgttatagaaacttccggcagagcggtttggactatggagccggctttcaggtaataaaacagctgcttatccatgaaaatgctgttcttgcacgaatatcacttcctgagagcattgataaaaaatccggcgggctgctggaaccgtgtttattggatggcatttttcaatccacaatcgggtttacgtccggtcaggaagacgatcataccgcatatttgccttttgaattaggtgagctggaaattcttcaaccaccttcggcaagcggctatgcttacattacagctgccgatgaaagacaacatgatgatgtcaaaaggtttcatatactatttatggatgaacacggatctgtaagtcttaaaataaaaaacttagcgttgaaggcattaagggctgcaccgcagactcaaaatgagcggcattcagctaagtattactctgatatgtggaagcgggcccctatgcttcatcagcctgaaggcagcggtttaaacagctgccttgtaatttcactccgtcaggatatatcagaaccgctgatccgccaggcatataaagatatcggcctgaacatgatctttgtccgccatggcggaagttttcaagaaaaagaagctgattcctttgaattgaacagcgtcaaacttgaaggctataagaaattgctggcgattcttaaagaaagacaagtgacaattgaccgcgtcattttaatcgggatgagccctgaaacgggaattgagcataacattcatgaaaagctggaagaggctgttttgccggttttcaatgtaacgaaagctctgttagcaacaatcccaagacataaaattctgatatcacatgtatttttcacaaggaacaatcaaatcttaccttatcaaatggcaatcagcggcttttttaggtcgcttcatttagaacatccaatgttgtccggtaaaaatattgaaatacacagcgatgaaattcagttacagctgaacaccggtctgcctgaattaaaaaaccttgtgaaagaaacagtcatcagcgatgatgcttcagagatcagatacagagatggaatcaggcaggtgaaacactctgcagaaattgaaagggcagagcccccaaaaagatggaagtaaaagaagggggagtttaccttattacaggaggaacaggcggcctgggcctgatttttgccagacatcttgtgcgaaaagggagaataaagcttgtgcttatcggcaggtcagagctttctgaggaagccgtaagcaatgtaaaagagctcgaaaaaaacggatcagaagttttttatgtaaaaaccgatatttctgataaggaaaatgtcaacaacctgataaaactcgtcaaaaacaaattaggtcctgttaaaggagttattcacagcgccggtgtgataaaagattcattactcatcaataagcgtgaagaggatctcgattcagtcctggccagcaaggtttacggaacgatatggcttgaccggtatacagacagagaacctctggacttttttgttatgttttcatctatcagcgcaataatcgggaatgccggacaaactgattatgcttatgcaaaccggtttatggattactttgcggaaatgagagcggcggaaaataaacctggaaaaacagtctcgattaattggcctttatggaaagaaggcggtatgcaaattgacattcattcagagaagttcctttatgaccgtttcggaatgctgcctctgggaaaacgggaaggccttgcagcatttgatcaagcaatgacagggtgtgaacatcaaataatggtatttagcggtaatgaattaaagctggaacgaatgataacgattgacagcggaaaaagtgacccggcaatcgccgacgaaaatcacgaaccgaaagagctgtcaataactgaatctttaaaaagcactttgacgcgcatcatcaccggcgtattaaaaattgaagaacgggaatttgattttgaactgccgataagtgaatacggatttgattcaattatgtttacaatgctgggcaacgaattaaacgaaacattaggaatatcaatgatgccgtcagattttttcggtcttactgattttaatgaacttcttgagtttttaaagagtgagtattccgaagagcttcatctctgcggatctttttcttcagatgaatctgcggcgaaagacaggagagaaaatctgattgagggcatcgcaaagatgatgtccagtattttaaagattgacagaaaggaaatggaagaagagacttcattcggcgagtacggatttgattctattacgtttaccagactcggaaatgaaatcaatcaacaatatggtacggaattattgccgtccattttctttgaatgcaattcactggctgaactgactgattatgtaatcgagcaatacggagaaatcctttttgctgagacagaacctttttctgcagcagacgaaaaaacattgtacagcacgcctccgccggaatcctatgaacattcccctgagcctgaaaacaaaaccaggcaagaggaaagacatatgaatgagccggttgcaatagtgggaataagcggccgtttcccccaaacagatacgctggaagacttttgggaaggaattgaaaaagggcgggatatgattacagacattcctgaagaccgttgggactggaaagagtttgacggcgatccgatcagggacgtcaatagaacaaaaataaaaaaaggcggatttatcaaaggcgcggacagttttgatccgttgtttttcgggatttctcccgccgaagcagaattaatggatccccagcaaagaatttttatggagactgtatggaaaacaatagaagatgcgggctataagccgtcagatctggcagggacgaaaaccgcggtgtttgcaggggtcgccacaacggactatgcggaacgtctcaatgaaaatggcgtctctgttcaggcgcagaccgcaaccggtttaaatcattgtatattggctaatcgtatttcttaccagctgaacctgacgggtccgagcgaaccgattgacactgcctgttcaagttcattagttgcactccatcgtgcggctgaggggattcaaagaggcgattttgaaatggcgattgcaggcggagtgcatattatgacaagccctactctgtttatagcttttgataaagcaggtatgctttccaaagacggaaagtgcaaaacgtttgataaaagcgctgacggctatgtaaggagtgaaggggcggctgcagtactgcttaagccgctcagcaaagcacaggcagacggtgatcatatttatggtttgattaaagggtcagctgtaaatcacggcggccgcgccaattctttgacagctccgaatccgaacgcacaggcggacttattaaccgaagcttggcggaaggcgggggtcagtcccgccactgcgggatatatagaagcgcatggcacagggacaagtcttggcgatccgattgaagtaaacagcatcataaaggcatttaaaacgttatatcaagaatgggacattccttttgagaaacagaaaagctgcggaatcgggtctgtgaaaacaaacatcggccatctcgaaaccgctgccggaatagccggagtgctgaaagtgttactggcttttaaatatcgcaaacttccgggactcgcccatttttcagaactcaatccatacatcaaaatggaaaatacgccattttatatcacagaaaccgctcaaaagtggaatccgataaaagatgaagagaacaacgatctgccgaggagagcaggtgtcagctcattcggattcggcggtgtgaacgcacatattgttttagaggaatatagggaacctcaaaaagaagtaccggaaaacaacggtaaaacacacatttttgttttatctgcgaaaaccaaagatcaattacttgagtatatccggcttatggttcagtacttggatcgcgtgattgccggtgacatgaccgttaatgccagtgacatggaatttacattgcaaaacggccgggaagcaatgaacgagagaattgccgtatgtgcagtgagtctgactgagctgagagataaatacgtcagctttcttgataaaagcaaggtgcaaaatggcgtatttataagcgaaaacactgaagagcgtgcagctgtttctgaatatatgattcaggaggctcttcaaagcggaaaggaggagctgctcgcacaatggtgggccaatggagccgagtttgaatggaagaccatcggcaatgagaaattgaatagagtgccgctgccgtcttatccgtttgcaaaagagagttattggtttactccgaaaaagaacaaaggcgaggttaatagcaaaagtcttcacccattaatcagcgagaatgtctcaacattaaagaaacaagcatttaaaactgttatttccggaactgaatttttcgtcactgatcaccttgtttcaggagactgtgtgttgccgggagccgcttcgcttgaaatggctctagtttgtgcggaaataagcggagaaagtaaagtatataaaataaaagacgtgatgtggaacagacctatattatataaaggaaaaacgctgcacatttataccggcttggaaatgaaacaagataagttgaacgcaacgatatgtaaagagggcccggatggcgtgcagcaaatctgcacacaatgtgaaacagtattcggagacataaacagcaatcctgagtatgtcgatattgatcagttcatacgcagcagtaaaacggtcataagccggaaagagtgttatcaccgcttcagtcgtatgggcctgacatatcagagcggttttcaaacgttgaaagccgtatatcgcggtgatgtggagttaatggcagaattggagcttccggatcatttagcgaacgggttttcacattttacactccatccttcattaattgacggcggttttcaagcggctgcatttttgttaagagaaaatgagaaagacggcttatttgttccttattcacttagagagcttcacattaagagggcgcttactgcccgatgccatgtttcggtgagagaaaccggtttttatacgtataacattgattttattaacgagagcggcgaagtagccgtgagcatgaaagacttctctgtcagaaaagtgaccgggggagaattaaccgcaggtcataaaaatgaagatcaggaaattctcttcttattggaacaattgaaaaacggtgaactttctgctgaccaagtttatcagctgctggagggaaaatagtgcagatcaaacaaatactttccttaattgaagaacagcaaatgtctcctgatgcaggactggagctaattcgtacttacagaaaacaacaaatggaaaaaaaggcggagccggaatcacaagctccgtccccaaccattttttttaagaccgattgggtcaggacaaatcacattgatatgccgaatcagcaggcaccggggaatatgctgatttttgatcaggataaccgtctttttcagcatgccgagatgatgaatggagaacataaccgtgtcattcttgtaacgcccgattctgattacagaattgaacggaatagatgcacaatcaatccttctgatgaacatcatgtcgaaatgctgctgtctgatttggctgaaaacggatttacacctgatgtcgtgctttatttatggaatagagaaatcagagaattcactgaagaatctgttaatgaatctcttcgcagagggataaactcgctctttttattatcaaaagctttaatgcgaagaaacgaacctgttacgttattgcatatttattggacaagcggtctgaatcagccgtttcatgaagctgtcggagggttcgtgaaaacggtaaacatggaaagctccaagcttaaagcgaaaaccatacagatacgccacgaggattctgacataaatcctccggtttccgagatgtgggatgctgcaatcagtgaaatgcagcgcattcaaacggatgaatgtgagattttaatagactcatatacccgttatgtgaaagggctgcagcctattgatattccggaacacgataacggatctgtaacgtatcaaaaaggcggcatatatatcattaccggaggagccggaaaactcgggctgctgtttgcggaacacatcgctaatgaaaatcaagccgtgattatacttacaggccgttcttttttaacagctgatcaaaaagaacggatcagtatgcttaatgagagcggctctattgttgaatatcagcggacggacataacagatcgaacagaggcagagcgattcattttcggcattaaacagcggtacggcagcataaacgggatcatccatgctgccggcatccttcgtgattcatttcttgtaaataaaagtcccggtgattttacggacgtactgaaaccgaaagtttacgggacaatctggctggatgagctgacaaaagacgaagatcttgatttttttgttctcttttcttctttttccgcttacggaaatgccggccaaagtgactatgcgtacgcaaatcattttatggacagttttgcaatgcttcgatcccagctctctcgaaacggaaaaacactatcaatcaattggccgttattgaaagatggcggaatgagtctcgacagcagtggaatcgttcaaataaaagaaaaatacggaatgactccgatgcgaacttcctctgttctggaagcgtttctgaaaatgctgcggtcttcatttaccagcttaatgcctgcagaaggtgagcgggataaaatgataaaggcgctttcgattcaaagaaatacagctgcagcagatcaagatacactcacggcggaacacgatgaagaagcggaatatgctgcgaaagaaaaagtcaatgactatttaatcaagatcatcagcggtgtcttgaaaatccaagctcataaaataaatgcgaaagactcttttgagaagttcggaatcaactcacttatgatcatgtcacttattgcaaagcttgaagatactttcggggatcttccgaaaacaatcttttttgaatatcagaacattgaagagctttcaaacttcttcctaacatcttttaaagaaaaagtgcttaaggccgcaggggcagctccggtaacaagagtacagaagaaaagagaaaatccgagtaaaaaacagcaccggcagcagaaggatacacctgcaccgagcatggatcagccgggggaggatattgccattatcggtgtgagcggaagatatccgaattccgatactcttgaggagttctgggaaaacattgccggagggaaaaactgtattattgaaatccccgaggaacgttgggatttcagatcgaattacagtcccgacagaatggagaaggggaaaatcaacagtaagtggggcggttttatcagcggtgttgatcaattcgatccgctgtttttccacatttctcataaagaagctgagctgatggaccctcaggagcgaatttttctcgaaacctcctggcatacgtttgaagattcaggatatacaaaagagaagcttaacggtatgaaagccggtgtatttgtcggagccatgtacggacaatatcaattattcggcgcagaagaaactgcgcggggcaatccgattgcgctcagttccttcttttcatctattgccaacagggtttcgtacttttttaatctctccggcccgagcattgcactggatacgatgtgttcatcatcgctgacggccattcacttggcatgtgagagcattaaaagaggggaaagtgaaattgcgcttgcaggcggcgttaatgtatccatacaccccagcaaatacctttggctgagtcaaggtaattttgtttccaccgaaggattgtgcagaagtttcggagagggcggagacggctatgtcccgggagaaggttcgggagccgttctgttgaaacctctggaaaaagcaattgctgatcaggatcatatatacggagtgattaaaggaacatctgtaaatcatggcggaaaaaccaatggatttacggttccgaatccgaatgcacaagctgagctgattgctgaaaatttcaagaaatcgggcatcagtccgcgatccgtcagctacttggaagcacacggaacgggtacctcgctcggagatccgattgagatcgcaggattgacaaaagcttttgagaaatttacggatgataaacaattttgtgccataggttcagtgaagtctaatatcggacatttggagtctgccgcaggtatagcagcccttacaaaagttcttttacaatttaagcatcagaagttggcgccatccattcactcggaacagctgaaccaaaatatccgatttgaaaagacgcctttttacgttcagcagaaagaagaagagtggcggaaagaatcaggcgcctctaacaggagagcagcaatcagttcgttcggagcgggaggagcaaatgcccatgtcattgtggaggaatatcaaaaccatgcggacacacaaacaataagcggtccgtttgccgcagttctttctgccaaaaatgaagacagactgaaagaatacgcccggcgccttctgcaattcacagagcgggagacaacagcctcggcagctgatatcgcttttacattgcagacatgcagggagcctatggaagacagacttgctgttgtagcttccgatttgccggaacttaaggagaagctgagaactttctgtactgaaggaacaattggagagggcgtatacaaaggcaatgttacaaaagattttgataaagtctttatctttcatgatcaaaagatgaaagataaattcctcgaagtgatgatggagacaaaggacttgaatcttctagcaaaattatggtctttcggggctgatattcaatggagagagttatatgaagagtataccccgcaaaaggtcaagcttcctttatatccatttgctgaggagtcttactgggtgcctcgaaatcaaagcgcaatatttccggaaatattgccgcagcagtcttcactgcacccgcttctggattcgaatgaatctactctggaacagcagttttttaaaacgacattaagagaaaaagagatttggttaaaagaccacatcgtaaaaaacaagagcattctcccggcagctgcttttcttgaaatggcatgcgcagcgggaacgcggtcatatcgaaagaaagaggtcactcgtttaaaaaacgtgatctttgcaagaccggccatgcttttgcaagagagtctgaccatttacactcacatttccgtaaaagacggcaaaatattatttaatatgtcatctgacgaggatgctgctgtaaggactggatttgtgacgggggaattagattatgatcatcattacggtgatgatgatatagagaatatcgacagacaagagatgataaacagaagtgcttttgtccgtgaacaagatgaatgttacaagtattttcgggaaaacgggttcctgtatgggcgcgcttttcagccgattcaacgtttatggggcggaaaaacagaagcggttgcacacttattgctgccaaaagaagccgcatatgctcttgaaaattatacattgcatccgtctttaattgatggggctctgcaatctttgttcgggattacggacggaagagaagaggcatctgtttatgttcctttttcaataggagagattacgattcggaaaaaagtttcagcagaatgctgggcatatgcgcgtaaaacaggccaaaaaggtcaatccgagcttatttacgatattcagctgcttaatgaacaaggagaaagacttgcaggtttgaaggatgtaaccattcgtaaaaaagaaacgttttccgcggaggcacagactcgtgcaacagcggattccaatggaaagaacgagagagtaaaagagcttctcagacaattaaaagcgggcgaactgactgccgaagaagcagattatgcgctggagcatatgcaggattagtttatcattttgcggcagtgccatttgtaaaggggatgaagatttttatgaaagaagcccgtcatattagaaaaaaagtactttctgacatagaaagcggcatcatttctttggaagaaggagtaaagcggatacagcagcttggttctcattccgcagggggtaacggacaggcgatatattatcagacggtctggcagcggacagatctcagcatacatgtaaaaggcggccggcgtgagggcagccttttattatttgataaaaatgaagatgtgagtaaagaacttgctgcattgcatgatacaagggttattttggttaagccggggaaagagtttcgaaaaaccggggacggtgtatttgaaatcgacccccgctctgaaaaagattacataaacctgttaggatggcttatagaagaagagaagtcagatatacgggaagcggtgcatttatggtcagacatgccgtttgaaaaaacagagagagcaattcgtgaacaatgcgacagcggagtctattctttgtttttattacaacaggcgctcttcaaaaataactgccgcaaaccgatcaagctgttatatggatatttttcgcatctttccggagaacagcctctttacgcggcggcaagcggatttttgcggacattacagctggaaaatccgttaatctcagcaaaaagcattgaaatggagcagtcaatagcagccgttcacgcagctgatatcatacgcaatgagctgagtgatttccagccttcagatgtagagatccgttataaagacatgcagcgttatgtcaaacagctcaaaacgtatgaacccgaaaaaaattccggaagcggagctgtgccgctgagagaaaatggagtatatattatcgcgggcggcgcgggcggattaggatttacctttgcagaatatttggcttttcaaacaaaatgctgccttgttttaacaggtagatctccgctttcagatcatataagaaaacagctgaggcgattggaggatgccggttcttcagctgtttatgttcaggctgatattaccaataaggaagaagccgaatatgtagtcaaaaaagccaaaacttcttatggaaaagtaaacggggtcattcagggcgcgggaatcatccgggattctttccttcttaacaagtcacgagaggaattcgatcaggtaatcagaccgaaagtattgggtacgatgtggctgaatgatgctgttgagaaagaaaatcctgactttttcatttgcttctcctctacttccgcagtgttgggaaatgtcgggcaatctgattacgcgttcggaaacagttatatggatcattttatgaatatgcgttctgcccagcattctgatacgatttctctctctctgaactggccgctgtggaaagaagtcggcatgcaagtggatgagcgaacggtagagacaatgaaaaaggcgggtttttatcctttagaaaaagaagaaggtaaaaaagcgtttgccgtcgcattgtcctccggtttttcgcaattcactgtattttacggagatgagcaaattgacaatcatgttcatcaattatatgaacgaaaagacaatattcaggcagatgaaggaacagggagaaatatcgaatcatttgattcagagaaactgacagctgaaacatctgattttatcataaaaataattgctgcagaattcaggatgcctgcggacaaaatagatgcagaagaggcattggaaaaatacggacttgattccgttatgattatcaatatgacgaatgagcttgaaaaacatttcggcgcgctctcaaaaacgctgttattcgaatatcagactgcggcagaattgtcacagtatttcgttgaggagcacagggatactcttcttcataaactccggttaggagaaaacgggagcggcactccatctcagaagaaaaaagataataaacagacagccgatgttaacgggaaacagaaaatccagatgaaaaatcaggtgcagcaggagaagtatcatgacaatgatatcgctattatcggtatcagcggacgttacccgatggcaaatgatcttgatactctgtgggaaaacttattgaacggtaaagactgtataactgagatacctgaggatcggtgggattcgaggctgcactatcagcctgcggcgggcgacgaagtaaaaaaccaaagcaaatggggggatttattgacgatgtgtatcattttgatccgttgttctttaatatttctcctgccgaagctgaattaattgatccgcaggagagactgtttttagagacggtttggcacaccatagaagatgccgggtacgcaaagaaaacgcttgaaagaaaaaacgtcggtgtttttgcaggggttatgtacggccaatatcagctgtacagcgttggtcacgaagcggccgtttcttcctcatttgcatcaatcgcaaaccgggtatcctacttctttaatttcagcgggccaagtattgctttggacacgatgtgttcctcatcattaacggctgttcattttgcctgtgaaagtttaatcaggaatgaatgtgaaattgcaattgcaggaggcgtcaatttatccattcatcctcataaatatgaactcctgactcaaggaggatttttatccagtgatggccggtgcagaagcttcggttcaggaggagacggctatgtgccgggagaagggacaggtgccgtgctgctgaaacccgtaaaaaaggctattgccgacggtgatcagatttattcagttattaaggcaacagcgatcaaccacggtgctaagacgaatggatataccgtgccgaatccaaaagctcaaagtgaggtcattacgagagccttaaaaaaaggatgtattgatcccaaaagcatcagctatatagaagctcacggaacaggcaccgcgttaggagatccgattgaaatcaccggcctgaccaaagcattttcaggtgccgaacgcgataagaagacatgcgcgatcgggtcggttaaatcaaatatcggacatcttgaggctgctgcaggcatagcgggcattacgaaagttattcttcaaatgaaacataaaacgattgttccgtcactgactcattctgctgaattgaatgagaatataccgtttcaaaaaacacctttttatgtaccggacagagccgaaaaatgggagtcatccgttcccaggcgtgccggaatcagttctttcggggcaggaggagctaatgcccatgttattttagaagaatttgcggatgaagctatctctcctctcgcggctgaagaacctgaacagcttttatttgttttttctgcaaaaaatgccgacaggctggcagaatatgcaaaacgcgcaaaagaacaaatagcagccagagattattcattagaaacacttagaaatacagcatttactttacaaaccgggagagaagaaatgccgcacagattggctgttatcgcctccacaagagatgaattgcttaaagggctgacagactatactctcggaaatgcgagggatcatatttttacaagcggcaaagacacaacagaagctcaaaggacgaacaaagctgaaattgaagaatcagccgcaaacagggatcttgtgaagattgctgaatactgggttggcggtaatggagtagattggctgtcactttataaagatgtcactttgagacgggtatcagcaccgggatatccatttgccaaagagctatgcagaatagatgcgcaaaatacgggaagccgccggatgaacgtaaataacgatctgcatccttacatttcatgcaatatatctgattttaaagcccagaagtttcttatcaatgtaagcgataccggtttgtatataaaaacaaagtatcaagacaaggaaatgtttccgtttctcagccagattgaaatggcgagagctgccggagcgatggcttcagggaatccgattattaaattaactgagctctcctttagagaaccgatgttacaaagcggaagcaatgagcagatccggattgtattaaccccggataatcagggtgcatcgtattctatagaaaaacagagcgacttatccatttattcctcagggcggctcgaattagaaggcggggcgtacgagaacggaaatattcatcttgagccgttcctgtctcagggcgcagaccgtataccgtacgaagcgttttatcagcggcttgccgaattcggatacagctgcagtgacagtctgaaagccgcagagcactgcgtcagcaggaacggacaggtgcttttaaagataaaagcaaaggccgggccgaaagggtgcataatcaaaccggaagtgattgagagcgcatatcaagccgtcgtataccttgcgggggaaaatgccggagagaccccggaaaatattaaagaatgtacgatttttgatcatgagactgaacccgtttatgtatatgcagaacaaactgaagaaagcgattcggcttatgatgtgtatgtattagacaatgccggcgggattttgatggaactgagcgggctggtttttggcgaaaagcctaataaaaatgtacgtttttatgagcatgagtgggatcaaaaaaaccctctgattgaaatgaaagatagggagccaaaaacaattctggtctttgcaaaagatgaagcgttggctgaagctctgaaaaatcaatcagacagccgtgtcattctcgtcacgccggatcagcggcagaccgatcaaaatctgctgacattctgtataaacccggaagtgacgtcagattatattcgtttattcgaagaattggagaaaaaagggttttctcctgatgtcatcttgcacacgggagaaacattttacgcgggtgaccgccttctcagcggcctggaatcaattttttatttattaaaagccctgagcgcccgcagtgacgcctctctttatcttcattctctgcttcttgttcactcttttaaaaaaggcatgaatgatccgtatacgggcgctcttgcaggctgtttaaaaacggcaaatatgttggtgccatccgcagagaatgtgaagtcaatcggtttttcagaacgtatatcaattgaaaaaatggctgaattttgtcttaacgaaatggtttcaggcgtggaacggcaggcggaagaagttaaatatataaatgacaagaggtatgttaagacattaaaggagtatgtattcaatcatacagagcactctcatcagctgaaacagaaagggatttacctcataacgggcggtttgggcggtctgggcctgatttttgcaaaatatttagcctctcagtatcaagcaaaattagtattgacgggaagatcaccgttaacagctgataaacgacataacattgaccggctgcaggcgcttggaggagacgcggtatattatcaagctgatgccgcagatcaaaagacgatgggatgggtcatagaagaaacgaaacggacttggggatccattcaaggcgttattcattcagctggtcatgccgatgatcggttatttacagagatgaatctgactgattttacggaaggcatgactgctaaaattgaaggaacggtatgcttagatgaattaacgaaagatgagccgcttgatttctttatcgtattttcttctatttcttcggtcttcggagattttggacaggttaactatgcgttgggcaattattttcaagatcaatatataaattggagatccgaacagagccgcaggcaagagagacaaggcaagagcatttcgattaactggccgttgtggcgtaaaggcggaatgcatttaaacaaagaagctgaagacgcatatctttccgcatccgggtttgattatttggaaacggaagaagggatagcggcttttgagacaattttggcaagtgactgtccgcaaatttcggttgttaccggggatgccggaacaacaccagcaaaaaaagatctgccgcatcaaaaagtaaatacgcttccggttcgtcaagaggaaagttcttatagaggaccgggttctgcagacaatgtccttgaagaactgaaacaaatggtgtcggaattattgaaaattaacattgaacagctggatacggcagagaatttcggcaatctcggctttgattctatcagtttgaaaacattagctgtcagactgaataaaaaatacaagcttaagctgacacctgccgttttctttacttacagccatataaagtctctttcagaattcctaaacagtgaactgcgtactgttgcaaaagggaatacaggtgcagaaaaaaatatttctgaaaaaaggaaagtgcacgccgggaaaaccgcagggaaaaccgtgaagccgccgcgaagttttccgtttgaaaaaaagacagcaagacaggctgaccatcatccggagaagcagccggttgccattatcgggatgagttgtgtttttccgggagcaaaaaatgcagatgagttttggatcaatttaatcaatgaaaaagattcgattcaggaaattcccccggatcgatgggattggaaaaaatacgccgaaggcaaaggaagcagcgaagtacattcgaaatggggcggatttatcacagatgccgataaatttgatgaggcgtttttcaatattaatccgcgggaagcagaactcatggatcctcagcacagaatttatttgcaggaaacctggaaagcgatagaagatgcgggttacaaagcttcaaagctgtccggcaaacatatcggggtgtttacgggcattcaatttaatgattaccgccagctgctgatgaggcattcggacggggcgcatgcgtttgcgggaaccggaaacagccaggcgctcatcagcaatcgtgtatcccactattttaatttcagaggtccgagtgagtccattgatacagcctgctcaagcagtcttgtagcaatccacagagctgtgcgctcgattcaaaatggcgaaagtgagctggcggtagcaggcggggtttcgctgctcttagatccagtcacgcatatgtataccgataaactcggtattttgtctagggacggccggtgtaagacgtttgataaacttgccgacggttatgtccgcggtgaaggtgcagctgttctgttattgaaaccattgcaagcggcaatgaatgacagagacaatatttacggagtcctgagaggaaccggagaaaatcacggaggaagatctgcttcattgaccgctccgaacccggaagctcaggcagaactaataacgtctgtttacaaaaatgccgatattcctgttgatacgatatcttatattgaagcacacggaaccggaacagaactgggagatccgattgagattgaaggcttgaaaaaagcgtttggatcttttgagccgcatccaggaaagaatcatgaccaatattgcggcatcggttcagtaaaaacgaatatcggtcatttagagcccgcctctggaatgccggggctgattaaagtattactatccatgaagtataaaacattgcctgccacacttcatgttaaggagctgaacccttacattcaattaagcggaacaccgtttcatattgtcaataaaactatgaagtgggccagattaaaagatcgaaaaggaaatgaaattccgcgccgcgccggagtcagttcctttggattcggcggggcaaatgctcatgtcatcgtggaagaatttgaatacggacaagataaagcagtaactgccgagcgggatcaaatcattgttctatcggccaaaacaaaggaaaggctgatggttaaagccaaagagttaacagcgtttttacatgaagaactatcagttcaattcagtcagcaagaggtgcaggaacgtgatgtgcaagaggcggttcgggaagcggcagcgggtatcctgcgtttagataccgcaaatatagatgcaaagacacctctttcggaattcggatttgatccgttggcttattccgaattaatctcttatataaaccaaatgtacggcacagaaatatcactagatatatttcaggaattaatgaccctgagtgagctgtgccgctatatcagcagcgtctggaatcgatcagctgataaaccgtataacggcaattttagagaaaagtccggaatcggtcttgaagaaatagcatatacgctgcaaaccggaagggaaccatttgaatgccgccttgcgatcacttgctcgaataccggagatcttcttgaaaaattaaacggttacattcaggggagcagactgcaaggtgtttatgaaggaaatgtaacggattttgatagtctgtacgctcctttattcggcggccccgaaggtcatgcatatgttcaatcactgattcagcaaaacaagccggccaaactggctcagttgtggacgatcggttgtgaaatcagctgggaagacttgtatgaggaggaactcaaaccggttaaacggcctcttcctctttatcctttcagtaagaacagacattggattcatttaaataaagatgaagcgcagaagattgaggctttctcgaacactgagcttcacaattcaaataaagatacagcagatggagaaatcatgtcgcttcttgaaaaagcacaaacaggtgagatgaatacgaaagagacgtcagagctgatagaggagttgcttttccatgaatgaaaaaacgatgcaaattgagcaaatcgtgaaaaaggtgaaagaaggcagcctgacgcgtgaagaagggctggaattaattaagagtttggggaaaacccatctatatgaaatggtatgggatagacatgaatttaaaggcagtgaaaaattcccgaatacgaaagagccaattttatttttttgcaaagacgacagcatgtataccgtaatgaagagacagcttgaaggctatgaggcgcctttcatttacgtgacttccggcgagcgtttcgaagattgccggaacggtcgttttaaaatgaactttgcaaatgatgaggattatgatgcgctatgcggggttctgcgttctcaaaatataagaccccgccatattattcattttttagctgccgggctcttcaaaaatacagaagatgcaataagaaagcagctcaataaaagtctgttttccttgtttcaaatgtttcaggccttcatggcgaacaaactttgtccgaaagcagaagttttgtttctgtatgaaaatgccgagggcgaggttcagcccatttataacgcggttgaaagttttcttaagaccgtacaggccgaaaatccgaatttcacatgtaaggctgcagagctgaaatcaatgtttgacgagccgtttacaaagcagcatattgcagatgtcatctcttttgaatggaacaatcaatgcaagacggaccactttacctgttatgagccgaggcattattataaaaggcagcttaaaagagtaaaaaaagaagatggggagaaacatagtttcagtgtaaaaaagaacggtgtgtatttaattacgggaggagccggaggcctcgggtatctgtttgcggaatatctggcgaaacaggcggaagtcaagctggtattaaccgggcgttctccggcatcccgtgaaacggcgcaaaaattgagcgcgcttgaaaatctcggtgctgaagccttatatgtcccggcagatatttcaaaggaaaaagaggcggacgcgttaattaagcacattaagcagacattcggagaattaaacggaattttgcacagtgccggacttgttaaggatgcatttatcataaaaaaagcgaaagaaagcatagaagaagttatagcgcctaaagtattcggaaccgtttggctggataaagcagctgaagaagagcctcttgatttcttcgttatgttttcatccctttcggccgttctgcctaatgcgggtcagagcgactacgccttcgctaacggatgtatggacggattcacccagtatcgaagcattaagggacgtcccgggaaaacactttctattaattggcctttatgggatgcggggaatatgacagttggtccggcagagctgcaggctttaagacacacggggctggaacttttatctgcccaagcagggcttgccgcttttcaggacagtatgagccgttctgcttctcagctggctgttatcagcggagacaaagatagaataagtgaattactctcaactgaccataaaaagatagagactgtgcctgaaaacaacagtctgccgcaattaaatgaaaaagatctgaaaaagcaaacgatccgtctattgacagagatcgtcggtgcggaaacgggaagaccggcggacagcattttacccgaggatacatttgaccgttacggaattgattctctaacaattttaggtcttaactcccgtctcgaaaagtattttggaagagtgtctaagactcttttctttgaatacagcagtgttgaagagctgtcagagtattttcttgaacactatcaacatgagttgaagaaggcgtttttaccggcagccgaacagcgaattgatcattcggcgccggcgaaacgggagaagctttccgtttcccgcataccatccgcaccttccgaggaagatattgcaattatcggtatagccggccgctacccgatggcgaaggatgtggaacagttttgggaaaatatttcttccggaaaagattgtataacggaaataccgaaagagcgctgggattttcggaaatattatcacacaggtgacaatgcccgtcatgatagcaaatggggaggttttataaaagacgctgataaattcgatccgctgttcttctcaatttcgcctcgtgatgccgagttaattgatcctcaggaacggttatttttagagacagcatggcacacgtttgaagatgcgggttacacaaagaaaaagttgaaacggcataagacaggggtatttgtcggcgtcacctacagccactatcagttatttgcagccggtgcttcagatgatgagggacgtcaggcgctcttgtcttcttattcgtctatcgcaaaccgggtgtcatatttctttgacctgcacggacccagccttgcaattgatacaatgtgttcttcttcactttctgctgttcattttgcatgtgaaagtttaaaaaggggagaatccaccctcgccatagccggaggagtgaatttatccttacacccggataaatatactttactttcacaaaatcattttgtttcaagcgatgggcgctgcagaagctttggagcgggaggagacggatatgtgccgggagaaggagtcggggccgttcttttgaaatcgctttctgccgcaaaggctgacggggacaggatttacggtgtgattaagggaacatctgtaaatcacggcggaaaaacaaatggatacactgtgccaaatccgggcgagcaggcaaacgtcatcagtgaaactcttgataaggcggggattgatgcagacagcataagttatattgaagcgcatggcacagggacatctttgggagacccgattgaaatttcaggtttaaccaaagctttgcacagctcgaaaagcgattatcgttgtgcaattggttcggttaagtcaaatatcggacacctagaggccgcggcgggaattgcttctatcacaaaagtgctgatgcaaatgaagtataaacagcttgctccttcccttcattccgataacttaaatcctaatattgattttgaggaaacaccgttttacgtgcagtctgaattgaccgattgggagacgccgcaaaatcaagccagaaggtcgggtatcagttctttcggcgctggaggatctaatgcccacattatcatcgaagagtacaagaatgaagaaaagatggaaacggtacagagcaacaagacgcaaattattctgctttctgccaaaaatgaagaacggctcagactcttgattgatgcatatataaaagaactggagccaaaaacgtcactagctgatgccgcgtacacttcgcagaccgggagaaacgctatggaagagcggctcgctgttgaggttagcagccttgacgatcttcgcgataagctgacgatgtatttgcggtcagatcataagttaaacggtttatataggggaaacgcccgccgaggcgccggtcaaaagaatgccctgtcagccgctcactttgaaaatgcaagagatatggccattcactgggtgaacggaggagacgttgaatgggaagagatgtacactgcggaattaccgaagcttatttctcttcctgcatacccttttgaacggaacagatattgggtgcctgccgcaaaagcagcacagaaacagaaaacaggtgtaccgcagagtctgccccatgcaccgactgacttatcatttgatgtattaaaaaaatcgtggaaaaaacaaaaggctgcgccttccgcttttacgaaaggacaggtgatgatcctggctaatagtgaaagtgagcggcttgcattcgaattgtttgattcagatcctctgattgaacccgctgtcatttgcgcagataactgggatcattcggatggggaagccaaaaaaacggctctagcagtcatagaagaaaatccggaaatcatcggcatgattgacctgtcagatttgcggagtaatcaaaacggggcacgcaccggcacaatcgggaagctgacactgctgcaggaaatcataaagacacgtaaaaagcttttcgttttacatgtgacaagagggctgcagacacttctgaatgacaagccgtcgttagccggagccgaaacagccggactatataaaatgctgagcgcggagtatcaaaagataaaatcaaaaacaatagatgtagacgggcatgtcgggactgcggcggaactgagacaggtaatcacagatgaagcttgcgctgacgggctgtatagtgaaatctgctaccggaacggtgatcgttatattccatacgtcgagaaattaaatgcggcggaaataaaccggaacctatccggtctgccggtatgccgtacggatcaaaccttggttattacagggggaacaagagggatcggagcagaacttgccagacattatgccggcaagggagtcaaaaaacttgtgctgatgggagtaaccgaccttccggaatctgataaaatagccggcatgttagaagacaccgatgaaaagtcacctctttattcgaaattacaactgctgcatgagttggatcaaaagggagttcaggtggaagtgtattccgggccgctcacggaaaaagaaaaattacatcgcttcttttcagaggtgcgaatgaagttcggcaaaatcggcggggtgattcattgcgctggtgcagccaatcattcgaatccggcttttattcataaatctgatcaagaaataagagaagtatttgagccaaaggtgcaggggatgcaagtacttcatgacgtttttattgatgacgaacttgatttcttcattttgttttcatctgttgcgagcgcttttcctttattaggcgccggaacaagtgactatgccgcggctaacgcttttatggattactttgcggcgtatcagcatgcagccggcaaaacatattatcaatcaattaactggccgagctggaaggacattgggatgggcgaggtgacaagtccatcatatcaggcactcggtttactttcacactcaacagaaacaggtatttccatgctggatgaaatcatgacgataaacggatatccatgccttataccggcaaagacacatccggagaaattcaagctgaagcagctgcttcagacaagaattcaagcggctaaaaataacccggatgctgaggaaaaagtgatctctggtcatggtgacaatgaagctatgatcaggaagttaatggagattttttccgcggagctgaaaataccttacgggaatttagatcaggatacgtcttttgcggattacggagttgattcaatcttactggttcagcttgtcaaaaaagcggaagatgcatttcaaataaaaattgaaccttcggcttttctggagtatccgagtttttcacaactgggcgtctatttgaacgagttatttgcaagtgaggggatcagtcctcaaattgattcagaaaatattgaggttcggaataaagagcaacatataaatcaaaatgcttccgaagtacgggacagcggatctcaaatgcaaccaaccagtctgaatcaaatcgctattatcggaatgggctgtgagtttccggatgctccggacacagaaacattctggagaaatttgaagaaaggacaacatagtgtccgtgaagtcccggcgtcgcgatgggatatttcttcatactactctgacacctatgaaaaaggaaaaagtatcagtaagtggggcggatttcttcaagatattgagtctttcgatcccgcgttttttaatatgaacaaaagtgaggcatcagagcttgatccgttaatcaaaaaatgccttgaggtcagcgtccagacattgagagacggcggctatacaaaggaagaagtatcaaacaaagaagtcggcgttttcatcggttcgcgcaccgggacgtttatgtccaaaataggttccccttcaaaaaatacgatcgtgggtataggacaaaatttcataggcgcgcatatctcacacttttttaatctgaaaggaccgaatctggttgtagacacggcttgttcttcttcattggtcagcgtccatctcgcttgtcaaagcctgatgtcaaaagagtcagatatggcaattgcgggcggggttgacattttgctggatcaaaagccttacgtcatgctgagtgaggctcgggcgctttcacctgaaggaaaatgtcatacatttgatgagaaggcagatggatttgtaccgggagaaggatgcggcgcagtccttttgaaaagacttgatgacgcccttgccgaaggtgacagaatttacgcggtaattgactcctccgcggttaataatgacggacagacaatggggatgacaacacctaatccgaaagcgcaaagcgcagtgataaaaaaagccctgaaaaaggcggaatagatgcagatactctcagttatgtcgaaacgcatggcaccggtacgatgataggagatccgattgaattaaaagcgctgactgaagtgttccgggaggttacggaagaaacgcaattttgcggagtaggcagcgtaaaaacgaatttcggacatttaatgagcgcagcggggatagcgagtattataaaggttgccttatccataaaaaatcagatgctcccgccgacactacattgtaaaacgccaaatccgcgttttaaatttgatcagtcgcctttctttccgaacacgtctttaaaagaatggcgtcccagaaaagggattttgagagccggaatcagttcttttggattcgggggcacgaacgcacatatgatattgagcgacagccatctcacgttaggatatggagagacaaaaagacacccgctttctccggttatattcaataaggaacaatgctggatcgacaatggagaagctccagaaaaggaagagtcagaattgctgattcctttacttgatttcaaagaattataaagaaaagaaaaggaatgagacaggtggccagtaatcaaaactatcagttcacattaacaattaaacatacggactatattgtcagggatcaccgggtgcatggcacccggattatacccggtgtcacatttttagatatgatataccgtatggcgctgagtaaaggtttgcctattgaagaactcgagtgtcagaatattttgtatttggaacctgtagcaacatcggacacctttgacagagaaatccgcatccgttttcagggattggaacagggatgggaaatccaggcgaagagcagaaaggtaaaagatgaccggattctggatgaaagctgggatgagaatatgaactgcaggctcatgcagaaattcccggaaagcatgagttcaattcatatcgatgaaatcaaacatgcctccgtccgtgaagccgatatggagatatgctatgactatttaaaaaaggttgatatagagcattttgaatttatgaagagtctggggaaggtttatgcgtctgatcattctgtacttgcagagttgtcgctcagccaaattgccaaacaatataccggctattttcaattgcatcccacttttcttgatgcgtctaccatcatatcgatcctttatcaggcatgtcccgaatattttacacaaggatctccggcaagccggatgaaaacgtatattcccattcatattgaatctttccgtatgacgaagcgcctggaagacaggtgttatgtgtacatagagaagcaagaccaaaatcatgattcaggggatgtcatccaagtcagttacggtttgtacgatgcacacggggagatgatcgcttattttacacggctgtctgtgaaacatattcgctcaaaagatttaattgaaaatctgaagcagactcgtttagaaactgaagcggcttctcagccaaaagacggcctgatgagaaaagattcaatcatagatcgaagcgaaagcattgagacacaccttaaagaattaatatccggggtttcaaatatagatctgcgtgacataaggacagacattggtttttatgaacaaggcctggattccgcttctttgcttgccattgtcaaagaacttgaaaacaaaacaggggaacagctgtatcctacactcctgtttgagcagaaaacgatccgggaactcgccgcgtatattaaagaaaatcaaaaaatgtccagttatttcttaacgcaaaatcaaccggctgaaaagcctgacatgaaagaaagtaagaacgaaaatctttccgctcttataacagaaggagacattcagcagctgatcgcagacatcaaagggactgcccctgaaacactctctgtggtaaaaggtttttatgaacaaggcctggattccgtcacacttatgcaagccgtaaaggcattggaggagaaaacaggcagggaactgtaccctactttattgtttgagtatccgacgattcaaaaacttgcaaattattttgcggagagcggcgaaaagacttccgttgacaaagacctccctctacatcatggagagaatcatacggctctgacctatttaacgccgtattggagacaaaaggctgccgcttgggacccgcattgcggaaataaaaagaaaagaacatgtctgctgtttcaatatgacagagagctttttcattttatgcgggaaaatgctgaaaatggattcgaaaatacacagatcattctcgttttatcagggaatcgtttctcctatcacggagacggaatttatgagatagatcacagggaggaagcccactttgacaggcttgcagctgatctgaaaaaaagggggcaaatgcccgacaccgtggtgtacgggtggccggaaggatcatttgccggcccggaaaaaataagtgaacagctttctaaaggggcttacccgctattctttttcagccgggcattgatgcgcagcaaggcggaaaaaaaggttgtatcgcttttcctttatccggcggaccataaaaatgatcagccgctttacgcttcagtccatggcgcagggcagtctattttgcttgagaacccgaaactggcccttaagacaatcgggatatcagtttcagacaagacatcgttgccggctcttacagctgaaatcatcagatgcgaatcaactgaagcgcatccgggagaaaccgatctttattatgaaggaaatgtgcgctgggtccgtgccttacgggaagcagaaccggctcaaaactcagatttctcctttaaagaaaacggagtatacatgattacaggaggggccggcggcttaggccttatatttgcagaacatatcgcagcgcaaacgaaagccaatattattttagcgggccgttctgaactgacggaagacaaaaagaacaaaatcagccgaatgaaagcaggcggttcttccgttcaatatataagaggagatttttcagatagccgcgatgcagagcgaatcataaaaactattaaaaggaaattcggagaaatcaacggtgtgatacacagtgccggtgtgacgcacgacgctttattgattcaaaaatcaaaagatgaaattcaggaagtgatcgctccgaaaataaatgggacggtcttattggacagcttgctgcaaaccgaacctttggacttctttgtgatgttttcatcaagcagctcgatgtacgggaatatcggacagacggattatgcattggctaaccggttcatcgatctttttgctgagtggcgtgaaggaatgaggcggaaaaaagaacgctccggcgtctcagtagccatcggctggcccctatgggaagacggcggcatgaaagtggataaacaaactgaaaaatggatgaaacaaaaaatcggtatggttccccttagtaaaaccaatgggatcaaagcttttcaagattcactctctatgaacgcatcacagctgatcgtgtttgaaggtgacaaagaaaaattggaatctgcacttcaagataccttcaaggaggatgaaagccgtgagatccaaataaatgaaacagctgatacaaggcatcaagacattgccattatcggtttaagcggaaagtatccgatggctgaagacttacctgaattttgggagaatttaaagagcggaaaagattgtattacagaaatcccgcctgaccgctggaatatagatgatttcttcagcgaagacagagatatgaaagggaagtcttacagcaagtggggaggttttatcagcggagccgatcaatttgatccgcttttctttcatatttccccaagggaagcagaacttatggatccccaggaaagactctttttagaaacggccaaaaattgttttgaagactcagggtacccgagaaacatgctggaaaagatgaaagtcggtgtatttgtcggtgcaatgtggggccaatatcaactatttgaaggagaagaaaatggagcggctttttcgccggcttccgtctattcttcaattgccaatcgggtgtcttattattttcatttaaaaggtccgagtttggctctggatacaatgtgctcttcatcattgacctctattcattacgcatgccaaagcatacattgcggagagagcgatatggcattagccggcggagtgaatttgtcaatacatccgaataaatataagttcctcagcatgggacagtttctatcaagtgacggcagatgccggagttttggaaaagacggaagcggttacgttcccggtgagggagtcggagccgtattgttaaaaccattgaaaaaagcaatagaagatcaagatcaaatatacggcgtgattaagggaagcgccgttaaccatggaggaaagacgagcgggtattccataccgaatccggatgcgcaggcggaggtcatttcagaagcgcttcgtaaagctgacattgatccgaacaccgtcaattatattgaagcgcatggaacagggacatcattaggcgatccgattgaaattcaaggactgaaagattcctatcaattgaaccatccttgcgccatcggttcggtgaaatccaatatcggacatttagaatctgcggcaggaatcgctgcggtaacgaaagtgcttctccaaatgaagaataagcagcttgttccttctctgcattccgatattgttaatccgtttatagattttgatcaggttccttttcaagtgcagcggaaagcggctgaatggaatattccgcaaaacagccatgctgttcatcctttgagagccggggtaagcgcttttggggcaggaggaacaaacgcgcatcttatattggaagcgtatgaaccgccaaaagcatttgatcatcaaagcggccgagtgatctttgttttatcggctcaagacaaacaacggctgataaaatatgcaaaggttatggctgattttctatcagaaaatgaatcgaaggataacaatcataaactgcgtcttcaggatattgcctatacacttcagacgggacgcgatcatatggaagaacggctggcgatagtggcagattccgggcaggtcattgctgaagagctttcagcttatatcaggggtgaaaaaagcagcctgagccataccggtaatacattcgaatcagaagttcacaatgaaatgcctcacgtttgttcagattacgccgaagcagcatccaaatgggtaaatggaagaaagatagattgggagacttttgaggtgaatcggaatgcccgcaggatttctatcccgggacaaccgctgatcaaacagcggtattggatagcggaaaaaggggaagcacttgtttcagcggatgtgagtaagacgggccaccctttcttggggagtaacacgtccgattttcatcagttcagtttcacgaaaaaaatcagccgtaatcatccgttcgcactaagtctgtctgaaggaaacgtgtcctttttcccttatgcatctttggctgaaatggctatcgtcaatgcagcggcggcatttggacaaccagttcaaacattgaccgatttattgtggaccgaaagcatgaacggaatgacagatatacgggaactgatgattacgctgacgcctgagcgtgactttgcgcggtttgacatatatgcaaacacaaaaaatgagaataaagtacgtcttgccagcggaaatgcgcatatggttaagcctgaaagcggtatgcttcctgaagcgcttgatattgctgaagtcaaatcagaaatgactgaacatccggctgaagcgccttttgtcattgaatcagcgaaaaacagttacggaatgctgtcgcttcattcaatgccggatgagctttatgcaaaaagagaaaattttacgatttctcctgaagcgcttgagtccgcgattcaagccagtgcattttttgtcagcggagaaaccttcccggaattgatcggaatgggagcggcggatgtctatcagcctctcgctcaaaatttttatgtttatactcaaaaagtgaaccggcagaacagccgtgatgtaacgtgtcatatgacatttacagatggaaacggaagcattctggcggagtgcagagatgtgagattcagatatggtcatgaaaaagacactgttcagacggacgatgaactcattcgtctcctgcgtcaattggaaaccaatgatattgatcagaaggctgtattgaaacaattaatgggggaagaatgatgaacggaaaacgtgaacaaatcagcgatattcttgatctgattcaaacaggacaaatgtcggctgacgaaggctatgcccgtgtaacatccattcagaatcaaaaatcacgggcatcgaaccatcctcttttatattacaagccggaatggacagaatcgttcattccgagtacgaagagcgtacccttgacgggattgctcctgatttttgcagaaaatgaacggcaaatacaagaattgagcggtttgtttaaggactgcactctcttgtttgtcatccgcggagaagaatttgctgttttacatgatgatacgatttgtatgaaccacgtgaaaaaagacgattatctaaagctgttccgatacattcatgatcattatcagccgcccgaaaagattcttcacttgtggtctgattctcaggctgacatgagtaagggaggtatacagaaacaattggaaaacggattgttttctcttctgtatattacacaggcgctgattgaattaaaatggaaaaagataataaaactgacgcatatttttcaaactcagaataaagaacaactgccgctgcatcatgctctcggcggattggtgaaaaccgttcaccaggaacaccccaattttcactatcagattatcaatatcactcaatcagagggtgcgggagccgctcttccagcaatagctgatatatatcagagagagtgtgacgaaaaacgggatatccattttgaagtgcgctatgaaaacggcagacgttttacgaaaagctataataaagccggcttattcgatttaacccagccgctgaaacatcatgaaaattatctgattacaggaggcctgggcggtctcggttatatactggcaaaacatctgtcggaaaaatggaaagcgaatctcatattgacagggcgctctgatttaactgaagagcagaaaaaaaagatcgaatatttaagaagttcaggttcaacagttgaatatatccgatctgatgtttcaaaacaaagtgatgctgaacggatgtttgcttttgcaaaagagcagttcggcaccttacatggagtatttcacagtgccggcgtactccgtgactcttttatcttaagaaagacaaaagaagaaatcgatcaagtcacaagttcgaaagtttatggcgcgctctggctggcggaagaaatcaaaaaaatgaaagttgaattacttgtcttgttttcatccacatcggcagtcttcggatcagccggccaatgtgactatgctttcgccaatgcctttttggatcagtatgcagcagttatgaccgcaaaagagtctgccgaaagggtggtgtcagtcaattggccgctatggacttccggcgggatgaatattgacgatgaaggaatatcctacatgaaacaggaactcggccttgacccgctagatgacggtgacggaatacaggctctggagaacagcttgtgtcaatcatctgaacagctgatcgccctgaaaggccgaaaagaaaagattgaggatgtgctgaagcgtgccggcacaatcagcttacattcagaccggcaggaagatgccgatttacaaagcgatgaattaagacaaaatatcatcagttatctaaaaaatataatgtcagaggaattgaaattaccggtctcactcatagatgaaaaacaatacctggagaaatacggcattgattcagtgatgatcatgcgcctgaccaaaaagctggagcaaagtatcggcagattgtcgaaaacattattttttgaatatcattccatatcgcagttagccgaatatttcctgagtcatcacagcgaacgaatgatgaaactgctgaacccggccggcaaatctgaacttgtttcatatcaaaaaaagcaaaaaagaaaaccagtggaaacaaaagcgccggcacgctctgaaggagaaggttcaaaagagcacattgcggccgatcccctttctgctgatatagccattatcggtgtcagcggcagatatccgggtgcggaaaacatcagagagttccagaatgtgctgatgaatggacgggattgcgtaagcgaaattcctgatgaccggaaggaaatgctcgagggaagctgctataagtggggaggttttctgaaaaatccagaccggtttgatcctttatttttccggatatcaccgaaagaagctgcttttcttgatcctcaggaacgtctctttttagagacagtgtacaataccatagaggatgcgggttataaaccttcagatctgacccgcaaaaaggtcggagtatttgcaggcgtcacatatggaagctatcaatttttcggcgttgaagaatcacttaaaggaaatgaactggccgtcgggtctccattttctgcaatagcaaacagaatatcgtatttctttaattttaaggggccgagtatggcggtggatacaatgtgttcatcctctcttaacgccattcacttagcctgtgaaagtatacgaagaggagaaagcacacttgctgttgcgggcggagtcaatcttacacttcatccgaataaatatacattattaaatcaaagccgcttctttgcaagtgatggccgatgccgtacattcggcgagggcggtgacggttatgtaccgggagaaggagtgggctccgtacttttaaagccggcggcggaagcggtaagggacggagatcatatttatgcgctgattaaagcgacagcggtcaatcacggagggagaacaaacggttttacggttcctaatccaaatggtcagtctgaactgatacaggacgcgcttcagaaagcttgtattgaccctcgtacaattagttatattgaagctcacggaacgggaactgctctgggagacccgattgagatcaccggattaacaaaagcgtttcgggaatttacggagcacactcaatattgttcaatcggttctgtcaaatcaaatatcggtcatcttgaggccgcagcgggaattgccggtttgacaaaggttcttttgcaaatgaaactgaaaaaactgtttccttccatacatgcggagacgttgaatccaaatattgattttaaagcatctcccttttatgtacagcggtcattgcaagactggaagaaaccgaaactgcaggaaaacggaaaaacagtaactgttccgagaagagcgggaatcagctcattcggagcgggaggaacgaatgttcatatcattatagaagaatatgaagaaacaaacgtctcaacagaacatgttgagaacgaaccgcatattgtcctgttatctgccaaagacaatgaacgtcttcttgagtatgccgaaaacatgaaagattttattcagcgttcactaagtcctgaagtaaaggataaacagactgatatgaaagaaaaggtgaatgaagtactcaaaccgtttgtttcggaattgcttcatatccatccggaagaaattaatatttctgatcacctgagtgaatttggcgtagggcctttggaattaagccggatggcggattttattaacgaaatgtttcatattgaactcacgatgtatgaattaacggattgcccctccattcaagcggttactgaatacttactgaaggaatatgccggagcgataagagacatgttcccgaatgaagtgatggaaggcggccaatcggaaagcgtcgttttacgggatctggcatacactacacaatcgggcagagaagcgatggaggccagagcggcgattaccggtacctctcttaaagaaatgaaagataaattatctcagttttgccgcggtgacaagcaagttccaggcgtatatgttaatcagcaatcagatgcatttgctgaaaaaatgaaggcgttaacggaaggcagagcaggcgaattgtttgtaaagaccattattgagaacggtgaagcggaaaagctggctcaattatgggtttggggggcggatatcgactggaaatccgttcatcaacatttacagcagccgggtaaacggatctcaattccgacttatccgtttgcaaaagaacgttattgggttccgtccaggactgagaggacagagatccctcagcattcttctcaacatcacttgcaaaaaaaatggagggagaatccgtttgtaaatccatccgaaacaaaagagtacggactgacagtcgcatttgtgaatcaagacacagaatcaattgcccgcaccatttgtccggatatagatcaggagaatctgattgtcataaaacatcactcttcatatataaaacactctgatcaaatgtttgagtgttctttattagatgaaaaccacgcatacgacgttatctgtgagatcttctcgggcggtgagcggcaggtcgaaaatatatttgatttctcagatatcggaaaccagagtgaaaatcagaacggcatcccatatggtaaattcttatttatacaagaaataattaagcggagaaaaaaggaaacaccattatccattttacaactaaccaatggcttgcaggtatttaaagcggaaaaaccaaagctgacgggtgcagaatcagctgcttttctgaaagccctttctgcggaatacggctttgttcatgtgaaaacaatagatatagacagcatgaaagaaacgcataagctgaaacaaatctttgagattgaaagggcgcaatgtacaggagagaatgaagtatgctaccgcagcggcgtcagatatgttccgtattttgaagaagaaagaatcgataccggcggcggtcctgtttcatttcctgcggataaagccatcgtcattaccggcgggacagggggcattggcagagcaatagctgaagatttggtgaaacggggagtgaaaaaactcgtgctgacgggtacgcgtccattacctttgcgaagtgaatgggatcatttgctgaaagagggcagacaggacgaaaagacagtcagcaatataaaactgtttcaaagttttgaagaaaaaggtgtcgactatctgtattacagcggttctctcacaaatgaagagaagcttcgttcattctttcaccaagtaagccttgaatttaaagatattagcggtgtcatacactgtgccggactgcacagcggcggaaatccggcctttattcataaaagaatgagtgaatttaagacggtgtacgggccgaaagtcactggacttcagaatttggagcggatttttaataataggccgctggatttctttattctgttttcatcaattgcagcacagtcacccaaactgtcgaaaggaatgactgattacgcgtctgcaaatgcatatatggactatttcgcggcttatcattttcaaaaggggagaacgtatttcacgtccatcaattggccgagctggaaagaagtcggaatgggtactgtgacgagtcctttatatgatgaattgggattggactctctatccacgcgggaaggactggcgattttgtatcatgcactggagaaaaaatcggccaatatcattcctatcgtgaaaaaaggaacagtgtttcatgcagacagtctcctgaacatcaataaaaccggcaagacttcatttccggcccgaagacaggagactcccggcacttttgatcattcagaagggcttgtcagtgaactttctgccgtatttgccgaggaattgagcataccccttgaaaagcttaacccaaatacggattttcaggaatacggtgtggattctatacttcttgtcagcattatacatcgtatagaagcaatgattcagaaaaaaatcgaccctactgtgcttcttgaacacaacacgattcatggtctcgcggaatatatcggtaagacggcgccgccgttgaaaaaacaaatcgaacagactgattctcaaagcagcaatcagcatgatatgcagtctgtgacgagccgaaatacagaaccgcagacggcttccactgcaaagatagctgttatcggaatcggatgtaagtttccgggcgcggctgataaagaggaattttgggacaatctgagaaaagggaagaatcatattaaagaagtacctgattcccggtggaatatagaagaacattactctccggtgcagcaaaagggaaaaagcatcagcaaatggggaggatttattaatggaatcggcagcttcgatccggagtatttccgtatggaagaggagaaagccatccaaacggatccgctgataagacatttcttagaaacgagtgtacagactgtacgtgatgccggttatgaagaaacagaattatcgggaaaaaaagtcggcgtatttgtcggttccagaatgggcggctacggtcacaaactgccgaaagaaagcagcagccacatcgtcgggcttagtcaaaactttattgcttcacatgtgtcgcatttctttaattttcacggtccaagcatggtgtctgataccgcttgttcttcttcattagtcagcattcatttagcctgccaaagcataaaaaacggtgattcagaaatggcgctggcaggaggggcggatctgcttttggatgaaattccttacctgatgttaacagaaggaggagctctttcgccggacggtcagtgttttacttttgatgaaagggcaaacggctttgtacccggagagggttttggcgctgttcttttaaaaccgctggagaaagcaaaagctgacggaaatcggatatacggtatcattgaagcatcagctattaataacgacggtgcgacaatggggattacgactccgaatcctaagcttcaagagcaggttattcaagatgcatttgaaagagccgatatcactcccggatcagtcagctacgtcgaaactcacggcacaggcacgatgattggagatccgattgagcttcaggctctgacaaaagtattccgaagagacacaaacaaaacgcaattttgcggagtaggaagtgtaaaaaccaatatcggacacttattaagcgccgccggagcggcaagtttcattaaagtgattttatcaatatggcataaggaaattccgcctacattgaattgtgaaacgccaaatccccgctttgaatttgaaaagtcgcctttttatccgaatacagaactgagaagctggaaggatggaaaacggagggcgggcatcagcgctttcggtttcggcggaacaaacgcccaccttttggtaagcggcctggatgattcatatcattccgtcagaactccgctgccgcctgccgagtttgtcagaaaagagtactggccggattcaaatcgaaaaaaacaaatcaaacagaataaaaaacggcttcttgaaattattgatgaaacagagtagcacctgctctgtttctttactttgtaaaagaagaaaggttgtcgagttgcatgaggttcagcgtattagtcaaacatgacgattatattgtttcagaccatgtccttcatcaagtgcgtacgatacccggcgtaacgtatctggatttaataacacgatttttagctgagaaagggatatcaccccgaagttttgaaatcaaacatgttttattccgtgaacctgttgcgacgtcagtccattttgataaaaaagtcaccttccagtttacggaacaagaaaacggctggcttgttgaaacaacaagcaggaaatgggtcgctgaaaaggcggaaggtgaagcgtcagtcaacttgcaggcggaaatcataagaaaaaatgcgatagacgaaaagacaatttcaatcgaagcattaaagaaaggggccgtccggacttcgaatgctgaagccgcctatcgtaatttgcgcaggggcggcctgattcataaagattttatgaaattggaaggtacggtatatgaaggtgaaaattatattctgggagaggtcagtttaagcggactttcaaaagaatatacagatgacttttacatgcaccccgcatttttggatggatctctcagcctgttgggagtccttacatcagacttgccggatgaaggaacaaatgcgtttatccctatatatattgagacattccgggcactgcataaaacaaccgggtcttgttttgtgtatattgataaaaacagtataacgcagccgccttctaaagacattttatatgcggacatagaagtatacaggcctgatggagagcttgctttttattatgagcgattcggtgtgaaaagagtcagaaatgaaaaatcaatacaaaggctggagcattcccaaaaagctaaagacgtcggcagcgtaacgaacaataaagaaatgatcagaaataatttaatccaagagatagccggcatgattgaaaagcctgctgaaacggtgaagaatgatatttccttttacgagatgggcttggattctaaacagttattagacttatctaaaaaattagaactgttgttaggttcaaagctgtacccgactttattatttgattactccacaatcggtgaattgacggaatatctgcaggagaaatacggagctcgcgttacagactctatctctgatacagttcagcaccaagacagtcaaaaaacattaacagatgagctgtcatccattattggagatgtgacaaacacgccgccaaataaagcggacaaacaccaatctttttacgaactgggtcttgactcaaaacagctgctgcatatatcgaaaatgctcgaggaaagattggatacacaattgtatccgacattgctttttgattataacaatattcatgatttagcagcttatttagaagaaaaatatgatgtgcgtaatacgccggccgcagcttttaaagaaaaaacgcaaacgaaagagccgtctgaaaagccgatgcttgaatctttatatttacaaaaagaatggatagaatcgccattaaagtccggagaagtgcctaaggaaaatacattgattttcgatttcggcagttcattgagtgatgaaatccgaaagtacatcggcagtgaaaatgttatttatgcggaagccgccgctgaatatgaaatggtaaatgaaaagcattataaatttaatccggagcagtctgctcattacaccagactgttagatgatatgaaaaagtccggagcgtttccggcgtcaatcattcattacctgtcaaaacaagcttatactgaggcagcgttagatttgactcacagcttttattcaatcctttatttaagtaaagcgttgatccgtcaaaaaataaaagataacatcaaccttttgtacgtacatgacaaggatcaatatacaaatccgatttacgccgcgattggaggcttttttaaaacgcttaatgcggagcagccgaatataaagtgtaaaacggttgagatttcttcaagacaaaccattgaaaaagcatctttgcttctcaatgaattaagtgccggacatcatgaggctgtgaaatatgacggcgatcaaaaaaggcgggtgacagcatacaaagatgcttcgctgcaaccagggcaaaaggccgcaaagtttgtaaaaaacggagtgtatctcataatcggagggttaagcggcatcggctggattatttcagcgtttatttatgcaaatcacggagccagcgttatcattgccggacgatcgaaaatgacagcagaaatggaagaaaaattagacagcatccgatatgacggggcaaacatttcttacatccaggctgacatgtcagataaacagcaggtcatcaatttagcggaaaaaattcatgctgattattccgaaatcaacggggtcatttacagtgcaggcgtgttaaaagactctttcattatgaataaaacagacgcggaagctcaggcggtgctgcaatcaaaggtcaatggtgtgattcatttggatgaagcgctcagaaatatgcctttagacttttttgttttgttttcttccatctcttcagaaatcggaagtttgggtcaagctgattacgcctacgccaatcgttttctggagcattttgccgagtggagggaatgtatgagaaaggagggggggagatcaggaaaaaccatcgctgtaaattggcctttctggaaagacggaggcatgtcagttgatgccggcattcaagacattatgaaaaccgagtacggacttcacccattagaaaatactgccggaatcaaagcttttgaacactcgcttctcggccaaggccaccagctgatcgtgttatacggagaaaaagaaaaaatacaaaataatttcaatccgttatccgcccgttcagcaccgcctctggtaagagattcagcgattgcagccgattttgatgcttcgtcaatcgttacggaagaagaagctgaaagtcctttccgaatactcggcacagcttccaatcgtcatctagacgattatttgcattattggagcagactgaagaaaggagcccttcagcacgatcaaagcgatgccgcaaaaaaactcatcgctttttaccagacagaagaaacggaaaccgttcattttctggctaacacagaaaatgcccggcatatggaaatattgatgagcggtaagggtgaaacaattttactgatttgcggttttgctaccactgcttacatgtggaaagaacaaatgaaggagtgggcagaccaatttaatgtaattgtcatacacacaccgggttacgggctgagtgaggggagcgccgattttacactgagcgggctggctcagacttttattgaagtgctgaacgagataggggttgcttggccgatccacattgcggcagcttcttggggaggcatgataggacagaggatagcctatgaataccctgaaaaagtaaaaacactcattctttccggaagttacaccgaatacgaagaagaccctgaaagcagtgttgaggaaaaactgaaaaatgattttatagctataggaaaatcgcatgaatatgaaagtttatacaggaatcaattcttaaatgcttctattgaacgttttatgaagatacatcaacaagaaggctattctacgatcggctttttaaaagacatttatacaagaacgcttatccttacgggagagaaggaaagcgtagttgatcagaaagaaacaaaaaggctgaagaaactgctgagcaatgcagaattaaagaaaattaagggagcggggcatcttccgaacatcacacacccggaagaatttaataaagcggtgtcagaattcatcaagaaatcagtaagtaagggatgaaaacgatacatacagtacagggggagaaaacaatgaaacaaacaataagcaatccggcatttgatatgaaacaaattaacgctcttaacagccattatcagacgatgatagacaatggagatctgcaatgcgcgagttatatgatatcaagaggaggcgaggtttttgcggctgagtcgttaggggaatttaccggcggacaaaaagaaaagcaaacatttcagcttgatacaatcagagaaatcggttctttgacaaaagtgtttaccgctgcagccgtcatgcagctcgtcgaaaaaggtctgctcgatctgaaaatgccggtcaagctcattttgcctgcatttgataaaccgggtttcggagacattaaaattttacaccttttgactcatacggcgggattaagttttgagctggatattcaaaaggctgaaggcattgacttaacgaatgaggaagaatggataagctatctggtcagtacgcctttagagtacggagtggatgaagcatggaactattccagaaccggctttgtcatacttggcatcattatttccaaagtaacaggcatgtcctacgaacagtatgtaacaaagcatattattgaagcgctcggattagaaagaacgtttttttatgtgcctgatgctttaaaagaagaagtttgtgtgatcaatgagcacgagtgcgtacagctggaaaaaagtcatcacccgtattttccgaataaagcgacaagcggtctgtactcttcattggaagatatttggaagttagctgaaatgtttagaaataaaggcagattgaaagataagaagctgcttggaagaaaaacagtcgaggccatgctgagaaatcaaataaagcccggtcttcctttttacttcttcggagcgccaagagaggagggcggctttggtttaggcattaatttgtggccggccggtgaccattatttcatgacagaaggcacgttctcacatcttggaatgggttggtgcggcatgttttctgatccagccgaagattttacgtatgtatttttcactccgatttccgagtttcatcctcatgccgtactgacgccgctgaatatcgtgtgggcgggtattgaataattagacaaaagcatcgtcccgcctgttcggcaggcgggacgattgctaactgcccgtttttatcccgcggcaccttctcaaagcctgccctcgaagttaaataacttaatttactctttgtaattttttttaattatagtacagtagagcgtttttataatacagtttaaagtcttttatagtacagtttggcgcagtatgatcttaagttttataagcggtttcaaaataaggttataaataattgacggctttgtttaattactgtaaactatggttgttgatcatattgtactaataaaaaatctttttttattagtacagtttaaacgtcattatctttgcttaagcgctatgtgaatttctgaatgattaattttagaattgcagagcatgataagactgtttttaatacggatggctaaacggtatcctaaccctgttaaatcaaaagaagaggtggtttaaaaaatggctgcaaagacaaaaacttcaattgttgatagcaaaaaacaatttgatgctattaataagcagtttgaaacgttccaaattttaaatgctgaaggagaagtcgtaaataaagacgcaatgcctgatctttcagatgatcagttaaaggaattaatgagaagaatggtgtatatccgcattttagaccagcgttcaatttctctttcccgtcaaggacgtttaggtttctatgcaccgacagcgggccaggaagcttctcaaattgcatcacacttcgcgcttgaacaggacgactttatccttccgggttatcgtgacgttcctcagctgatttggcacgggcttcctttacatcaggcattcctgttctcaagaggccattttaaaggtaatcagatgcctgagggagtaaacgctttatcacctcaaattattattggtgctcaaattattcaaaccgcaggtgtagctttagggcttaaaaagcgcggtaaaaaagcggtagctattacttacactggtgacggcggagcttctcaaggtgacttctatgaaggaatgaactttgccggagcatttaaagcgccggcgatcttcgttgttcagaataaccgctatgcgatttcaactcctgtagaaaagcaatcatccgcacagacaattgcccaaaaagcagttgccgtcggtattacaggtgttcaagtagacggaatggacgcactagccgtttacgctgcaaccgcagaagcacgccagcgcgcaattaacggtgaaggtccgactctgattgaaactcttacattccgttacggacctcatacaatgtccggtgacgatccgactaaataccgtacgaaagaaatagaaaatgaatgggagcaaaaagacccgctcgtacgtttccgcaagttcttggaaaacaaaggactatggtctgaagaagaagagaacaaagtgattgaacaggccaaagaagaaatcaaacaagctatcaaaaaggctgacggcgaatcaaaaccgaaagtaacagagctgattgagaatatgtttgaagagccgacgttcaacttgaaagaacaacttgaaatttacaaagcgaaggagtcgaagtaagccatggcgcaaatgacaatgattcaagcgatcactgatgcgttacgcacagaactgaaaaacaatgaaaacgttctgcttttcggggaagatgtaggcgttgccggaggcgtattccgtgcaactgaaggccttcaaaaagaattcggtgaggaccgcgtatttgacacgccgcttgctgaatccggtatcggcggtctcgctctcggtttaggcctgcaagattaccgtcctgttatggaaatccagttcttcggatttgtatatgaagtaatggattcaatctcaggacaaatggctcgtctccgctaccgttccggcggacgctggacttctccggtgacaatccgttctccattcggcggaggggttcatacacctgaacttcacgctgacagtttggaaggccttatcgctcagcagccgggtattaaagttgttatcccttccactccttacgatgcaaaaggactgctgattgcctctatcagagacaatgatccggttgttttcttagagcatatgaaactttaccgttctttccgtcaggaagttcctgaagaggaatacacaatcgagcttggcaaagctgatgtgaaacgcgaaggtactgacctttctatcatcacatacggcgcgatggttcatgagtcgcttaaggctgctgaagagcttgaaaaagaaggcgtttctgctgaagttatcgaccttcgcactgtaagtccgcttgatattgatacgattattgcttctgttgaaaaaacaggccgcgcaattgtcgtgcaggaagctcaaaaacaagccggcatcgctgccaacgttgtagctgaaatcaatgaccgcgcgattctgagcctggaagctccggttctgcgtgttgcggcgcctgatacagtatttcctttctcgcttgctgagagcgtatggcttccaaaccataaagacgttcttgaaactgcgaaaaaagttcttgaattttaatcaggcatcttaaaagacggtaaagagagtccttttctcttatgatgaaggagtctgtttactaggttcaatgcttgcgtatgcataactaaaatttgcttaatcaactaggaggtcgaaaactgtggcatttgaatttaaacttccggatatcggggaaggtatccacgaaggcgaaatcgtaaaatggtttgtgaagccgaacgacgaggtagaagaagacgatgttctggctgaagtgcaaaatgataaagcagtggtagaaattccttcacctgttaaaggaaaagtattagaattaaaagttgaagagggaacagttgcaactgttggacaaacgattattacgtttgacgcacctggttacgaagatcttcaatttaaaggaagccatgattcaggagaggcgaaaactgaggctcaagttcagtcgtctgctgaagcagggcaggatatctctaaagaagagactcctaaagagcctgcaaaagaaaccggcgcaggacagcaggaccaagcggaagctgatccgaacaaacgcgtgatcgcgatgccttccgtacgcaaatatgcccgtgaaaaaggcgtggatatccgtaaagtaacaggttcaggcaataacggacgtgttgtaaaagaagatatcgacagctttgcaaatggaggagcggctcaagaagcgggaccgcaagaaacagctgcacctcaggaaacagctaaacctgcagcagctcaggctcctgaaggcgaattccctgaaacacgcgaaaaaatgagcggtatccgtaaagcgattgcgaaagcaatggtgaactctaagcatactgcaccgcacgtaactcttatggatgaagttgacgtaacaaatcttgttgctcaccgtaaacagttcaaacaagttgctgctgatcaaggcatcaagctgacttatctgccttacgtcgtcaaagcattaacatccgctttgaaaaaattccctgttttaaacacatcgattgatgataaaacagatgaagtgatccaaaaacattacttcaacatcggaattgcagcggataccgaaaaaggcctgcttgtgccggtagtgaaaaatgccgaccgtaaagccgttttcgaaatctctgatgaaatcaacagccttgctacaaaagcgcgtgaaggcaagcttgcacctgcggaaatgaaaggcgcttcttgcacgatcacaaatatcggttctgccggaggccaatggttcacaccggttatcaaccacccagaggttgcgattctcggtatcggccgtattgctgaaaaagcgatcgtccgtgacggtgaaattgtagctgctcctgtcttagctctttctctcagctttgaccaccgtatgattgacggagcaactgcacaaaatgcgttaaaccacatcaagcgtttactgaacgatccacaacttattttaatggaggcgtaatgttatggtagtaggagatttccctattgaaacagatactcttgtgattggtgcgggacccggcggctatgtagctgccatccgcgctgctcagcttggacaaaaagtaacagtcgttgaaaaagcaactcttggaggcgtttgtctgaacgtcggctgtattccttcaaaagcgctcatcaatgcaggccatcgttacgagaatgcaaaacattcagatgacatgggaatcactgctgagaacgtaacggttgactttacaaaagtccaagaatggaaagcttctgttgtaaataagcttaccggcggtgttgcaggtcttttaaaaggaaataaagtggacgttgtaaacggggaagcttatttcgtagacagcaactctgtccgcgtaatggatgagaactctgcgcaaacatacacatttaaaaacgcgatcattgctaccggttctcgtcctatcgaattgccaaacttcaaatatagcgaacgcgttctgaactctacaggcgcactggcgcttaaagaaattccgaaaaagctcgttgttatcggcggcggatatatcggtactgagcttggaacagcgtatgcgaacttcggaactgaattggttattttagaaggcggagatgaaattcttcctggcttcgaaaaacaaatgagttctctcgttacccgcagactgaagaaaaaaggcaacgttgaaatccatacaagcgccatggctaaaggcgttgaggaaagacctgacggcgtaacagttacattcgaagtaaaaggcgaagaaaaaacggttgatgctgattacgtattaatcactgtcggacgccgtccgaacactgatgagctcggccttgagcaagtcggtatcgaaatgactgaccgcggtgtcattaaaacagacaagcagtgccgcacaaacgtaccgaacatttacgcaatcggtgacatcattgacggacctcctttggctcacaaagcgtcttacgaaggtaaaatcgctgcggaagctatttcaggagagccggctgaaatcgattacctcggtattccggcggttgtattctctgagcctgaactggcttctgtcggttacactgaagcacaggcgaaagaagaaggcattgaagtcgttgcagctaagttccgtttgcagcaaacggacgtgcgctgtctcttaacgaaactgacggcttcatgaagctgatcacccgtaaagaagacggtcttgtaatcggtgcgcaaattgccggcgcaagcgcttctgacatgatttctgaattgagcctggcgatcgaaggcggaatgactgctgaagatatcgcaatgacaattcacgctcacccgacattgggcgaaatcactatggaagctgccgaagtagcaatcggaagcccgatccacatcgtaaaataatgatgtaacaaagaaacagcccccgtttgtaaaagcgggggctgtttttattgtgcaagcacatgctgcataggtttgatgatatcctcttttttctttacggatccctcaatcttcatgaccacatgccgatgattgatcaccatcagcgcagggaacgtgttgatttcctcttcccatccctttctgttgtcataaaccttcatttgatcgacatgatggggatatttcttttctaaatcaagaatcgcatcgtaataaggaacttctttatctatatgattttcatcggaaaaaaacaagatttgagtgtgatgaatgctgtcgatccggttatttttgaatggaatgacagtagaaaccgaacagcttgacagaacgaacagcatcaaaaaaaagggaatcaccgtacggtagcgcatctatcttactcctctgttttatataatatattggttcatccatttataaggactatattaagtgtatcacgagaggtgaaaaacctaaggcttgttactgaattgttatataattgaaaccgtttttaatgaagaaataatacgtgtgacaacttgcacagccgatgtgtaaaaaaggcacattgtttttcgtgagagcgctgttttttcgttatactgggggcaaaaccatatcaggagggattgcatgtataaagccattgcagccgtcatatgtatgtgcttactcgccggctgccaatcaaatgaaaagatgcaaacaaacaaaccccattctcaagccgcggccaatcatgccaaacgggaaaaccatcatacaaaagagaaaaaacagaaggcggagccccgttactatatcaatccgaaaaccttttctgtggaaaaaatggatgaacagaaagagaaaaaaccgatcgcattggtaacgatcgatgacgcgcctgatcagcatgccgctgagattgcggacaaactgcatgatctcaatgcgtcagcgatcttttttgtaaacggacattttttgaaaaaagatgaaaataagaaagcgcttaagcatattcatgagttaggttttatgatcggaaatcatacaatgactcatcaaaacttaaaagatctttccgaacaaaaacaacgggaagaaatcattggcgtcaataaagcggttgaaaaggtaataggagagaaacccgcatttttcagggcgcctttcggaagcaatacggactacagtgacagacttataaaaaaagaaggtatggtgaaaatgaactggaccttcgggtatgattgggatcagaaatatcaatccaaaaaagcgcttaccgatatcacactgagcagtccttacctgcgggacggcgccaacatattgatgcatgaccggaaatggacggctgaagccatgccggacattgtaaaaggattgcgtcataaaggatataccgtgattaaccctcgagctataaaaagaccgtaaaaaataaatgtgttatacaatttatcagttgacatattaaatgtgacataataatataataacaacaagtaaaaattaagcgttttcaaattctgagaaatggggaatgacagatgggtacaattgtttgccaagactgtaacgaagcgattcattactttgaggatgagaaggtcacgacgttatacggaacatgctgcggacaatgccagtgtcatcttgaagaagagtaaaaagcgtaaaaaaggcccgaaacgatttcgtttcgggcttctttatgtttattggatggctttttgctctttgatgactctgatcatttcaagcgtggcatcttcgggaccctgcacaggaaggccggcgtccaagtttttaaaaatgtagctgatattttcttcagtaatgatctcacccggaataaagatcggaattcccggcgggtacaccatgacaaactctgcaatgatccgtcccgcggattctgttaacggaatgacttccgtatttgcgtaaaacgcgtctcttggcgtcatcgctaacagaggaatctcaggaagcagaacttccgtttgctgatgagcataatcatttgcggaagcctgctttgaaatgtctgtaagcgcgcttacaagacggtcggcatctcctgctctgtctccgggggtgaaaatacataaaatattatacaaatcggacagctcgacttcgatattaaatgattcgcggagccatttttcaacgtcatgacccgtcaggccgaggtttttgaccgaaatgattaatttagtcggatcataactgaaggcagcttttgacccagtgatttcttcgccgacacagcggatgccttcaatttgattgaggcgttcccgtgtctgatccgccagcagaatcgtatcttcaagaagatcgcggccttctgtagcgaggcgttttcttgcgacatccagtgaagcgagaagcagataggatgttgacgttgtcgtcagcatgcttaaaatcgactgtactctttctttggaaacaaggccttctctcacatttaaaatggagctctgcgtcagggagcctcccaatttgtgcacgcttgtggctgccatatcagcgcccgcctgcatggcggacagaggaagcttatcatgaaaatgaatatgcacgccgtgcgcttcatcgacaagaacaggcacatcgaaagaatgcgcgagctttacaatgctgctcaagtcagctgccacaccgaagtatgtcggattgatgacaagcaggccttttgcgtcagggtgttccgtcaaagcccgctcggcggactcaagcgtaatgccgtgagaaattccgagctcatcgtcaatttccgggtgtataaaaatcggcaccgctccggaaaatacaatggccgacataatggatttatgaacgtttctcggaatgatgattttatctccgggtccgcatacggccatgaccatcgtcataatggcgccgctcgtcccttgtacggaaaagaaggtatggtctgcgccgaatgcttccgcggccagatcctgggcttctttaatgatgccctttggcgcatgtaaatcatccaggggttcaatattaattaaatctatgcttaacgcgttttctccgataaattgtctgaattccggatccattcccgcgccttttttatggcccggaatgtggaattggacaggctgtctgtccgcgtgctttttcagtccgctgtacaggggtgtttcatgttgcggcaattgttttcccacctttatcataatacctacggattagtttgtattacattcagttttattacccgttttttaaacgtaaaacaaatgaattatattatgaacttgaaagaaagtaaagaacaatttatgatctatggaagatgcttatttttgagcatgatgataaaggagtgaagacatttggaatatcaatatccgatgaatgaggactggacgacagaggaggccgtggatgtcattgctttttttcagcaggtggaaaacgcctatgaaaaaggagctgaccgagacagacttctgaatgcgtaccgccgctttaaagaaatcgttcccgggaaagcggaagaaaagaaaatctgcagccaatttgaagctgacagcacctattccccgtatcggactgtgaaacaggcgaaacaatcagatcaagcgattatcaaaatgtagacaaaagcgagccggcaatcggcccgctttttatgttatgagactttctgagtcagtgtgtataaaaaggaaagcttcctaaaagcatcttcaatggtttgcaggaattcattgttgttcatgttgatcacgtcttctttttgcagctgaatgccgcataaaagctctgcttttttcactgtctgcaggcgttcaaataatgttttcagctgctcctgatccatgtcggactgcttgtacgcacctggcttcgtatgatccggcgaccatacaaaatgaccgggaatctgttttgtgatttcctcctgcttcgcttccagcaatctgccgtattcctcttttatcggagattcataaatgatggcaaaccatacaaacatatgggtgtcccataaaccgatctgaaagtgagggagtttcttatagccgcgtttgctgttggcaaaggcaacccagctgtcagccggcgggttgacagatcttctcgcgtgcttggcgacatgcgggaacatttcatctcctgtcaatgctgacaatgtcggtgcgaaatgctctcctaacaaggtcagcttcggacggacttgttcttttaacacctccatgcgcggatctaaaccttctattgtaaatgtatcgaagtcttcttttgtaaaacgcatctgagtcatctttttcctccttaacgtaagtattcatattttaccacagccgccgcccgccgcaaaaacattgagaacgtttgagtcgagaggaatggtggtaaaaaacgaataggtaaacacacaattttaagaatgttgttacagccgaatataagtttccatacgatataagaagtatcattaatgaattggaaaaatgggatgcttttttaacaaatgatctctggaaggggcgaaagacaatgaggcaagtggtgaaggaaggattcagggaggaaaaaaataaccgtgtagctgtctggagactagaggttgattatgaattggcaaccctgtacgaggccatgcaaaaagagaatgaagatcaaatcgatctcagcaaaagaaaactggaacgtctcagaaaagaatggattcggcttaacggataaagaatagtaaaaacgaaccgcaggaaatggttcgtttttacgtgagaaggcatttttttcattttccttgctttttcatcgcctttatcagtatgctatagaataagctatacatagaaaagaggtacacggtatgacaaattggacggaaattgatgatatcgcaaaacaatgggtaaaagaagccggaacgagaatcagacaatccatgcaggaaagcttgacgattgaaacaaaatcaaatccgaatgatttagtcacaaatattgataaagagacggagcgctttttcattgaccgtatacaaggaacttttcccggacaccggattctcggagaagaagggcagggggataaactccgctcccttgacggaatcgtctggatcattgatccgattgacgggacgatgaattttgtccatcaaaagcggcatttcgcgatctccatcggcatctttgaagacggaaaaggcaaaatcggcttaatttatgatgtgatgcaggacgaactgtatcacgcattcagcggaaaaggggcttatctgaatgatacgccgcttgctcctttaaaagaagcttccattgaagaagccattattgcaatcaatgccacatgggtgacggaaaacagaaggattgacccgagtattttggcgccgctcgtaaaacgggtcagaggaacgcgttcctacggttcggcggcacttgagctggccggtgttgcggccggccgcattgacgcatacattacgatgaggctcgcgccgtgggattacgctgccggctgcgtgctgctgaacgaagtcgggggcatttacacgaccacagacggcgaaccgttcacgtttttagacaaccacagcgtgcttgcgggcaatccggctatacataaaattatctttgacgactatttacatgctgacaggtagagattttgaagaagaagatctcgggtttctggagcagctggcggcatcacacccggtgtggaaaaacgaagagttcggaacaaaaaatgcggcggagtttatgcttgcatactccatgtacaatggaacgtggctcgtatgggagattgacggcgctcctgccgccgtcagttttcatttggaatgggcgccttcaaacggaaaaccgtggctcggaaccgtggccgtcgctccggaggcaaaagagaaaggaatcggtcgcgcggtcattgaagagattgcgggccggctgagaggagagcataaagcgatgttttcagccgttcccctggacaggcaggaatgggttttgtttttaagccaatgcggctttgaacagcttaagcttgaaaaagacgatcgggaaaagacatatatgatcatggtgaagccattgtgaaatgttcagatataaaaaagagaccggatttctccggtctcttttcttgtttacaagccgaccgcattccaggccgcttctacgcttgcagcgtcttgagagccgtaaaggtcccgcgctgattgaatcaaagctgcttttgcatctttaaagcttgatgacggagtgagatataccgtcagtgcgcgatagtaaatctgctccgcttttttcactccgatttttgtaatcgtgttgtaagcggctttgttcggaattccgctgtttgtatgcacgccgccgtagtcgccggcatcagtgttcggaaggttttgataatttttgtaatggtcgggctgtccgtattttgtcggattggataagctgcggagagccggctggctgaccgtaatatcctcaccgatatcccagtcctcagtatcggtgaagtacccgaatacatcggagaaggattcgtttaaagcgcccggctgattttcatagttcaggttggctgtttcctgtgtaacgccgtgtgtcatttcatgggccgttacgtccattgaaccggaaagaggcgagaagaatgagccgtcaccgtcaccgtaaatcatttggtcgccgatccaggccgcgttattgtatctgctgccgtaatgaacggaagatacgattttgccgcctctattgtcgtagctgttgcgtttaaacgtctgatagaaataatcatacactttgccgagattgtaatgcgcatcaaccgcagcgcgctgagaagaagttgtgaactggtttgtagtgcttgatacgagcgtgcccggcaggttatattgtcggttttgcagatcgtacgtaataatttgtgttccggtaggcttcgaaagatcacgcattacatatttgccgttttcagaagaaatatttaatgagaccgtttttcctttaagagtcgtacctgttccggttgcagcggcatgctccactttgttttgctttttcaggactttccctgtttccgcatcaacggttacttcccagttagctggttccggttcgatgtagcggatggttacatcataggcgagtcggtatttaccgtcttttgtggccgctgctttcagctcggctttgtttttgtttgcaacgttgccgttggagacggcttcaggtgatttgccgattgctttaaaagcatgatccagcgcctgatttgcagataattttttgctgtttgccgttttggcagaagcatcgttgtttaattcaccgttaatcgcatagacattgttggatttatcgacgtgaataatgacttgcgagtctttcacaggcacaccgttaacgacaggcacataacggaagtgcttatagccgagatcatcggtcgtgtggtcaatcagcttcagtctctcagaagggttgcctttgaagactttgccgttttgtttcaagtattgcttgattgctttgtcactgactgaaggcaattcagattgcaccaaagaatgcttcggcacaaagttcgtcaggttttctttaagctgaggattctcagcggcctgaacacccggaagactgatggttaaactcataaaggaagcggcgacagcaacagacaatttcttacctaaacccacaataaatccccctttttgaaaataatgaaaacttatattgttataataaaccagcattctctcattctgcaatataaaactagacttcgctgatgaattgatagaatcgtcccgtaaaggcttcaggcgggcagcgtcaggggataagccgagaggcacgtgttgaatcaaacatgagtcgaatgatgcgatttattctgaaaaaaatgacaaatgaagtcgggagaaataatagaggaaaaatgttccgatctgtaaaactttttttatagccgtttgtctaaacaggtgaggccttaataaacgaaaaggattgtttcagatgtcagagattttcagtcattttattcagcatttcgacagatatttcaagagctgtcttacgaagagattgctgatgttttggactggagtctttcgaaggtgaagagcactctgtacagggcgagaatgcagctgaaacagcacttagcggaaaaaaggaaggacggacagatatgacttgctgtttagtgagagatttactccctatatatattgaaggcgattgtgaaacagaaacggagcggtttatttcccgccaccttgaatcatgcggtaagtgcgaaagtttatatcatatgatgaaggagccgcttgacctcggcagccccgagatgaaggagcccgcctgttatgcagaagaagaaaggcggtttaaggaacggtattacgggaagctgctgataaaagcagcctgtttgttcggcgctgttttctttatcatgctgatctttaaactgctgattaaaaaaaacgcccggctgcatgacatgaccgggcgttttatccgtttactcagccggatgaaaggctgtataaatgccttcaagcaagtcctgaggcagtgaattaaagaatccggcacacagctttgcttctttttttcctgctcctgctttttcagcaaggtcctgatcaaacgtatacacaccgtcttcttcaatcagcgcagattgaaggatatgaagactttgggaaaaagtggtgaacagctgatcaacgataagggcctctttttccgtaaatccgagctccaccgctttttctttattaaatgtatattcgccgtccgttttctcaatacattgagaaagaacggttaaaaattcggttgaactgtcccacagcttttgaatggtctgtgcggcttctttatctaatcccaattcaaccgctttttcaccgtcaaaataatagacgccgtctttttcgtaaatcgattggctgatgatgtcaatgagttttgccgcgtcttccggtgttttctctgcggaaacctgcagggtatgcggttcatttgcctggatcgtttttgcgccggcagaatcaagcggactgaatgcaagcaaggcggctgaggcggttgcggcggcagttacagcggttttcttcaaaaaagatgttttcatttcattctctccttgtcatgtgtatttgcttacagtcacaagtataaaaagacaatgatggaattgatataggaggtatggtattttctgcataacgatgccggactatttcagactgtatattctgagggaatctgctgatgtaactagaatgggggccgtcattcccggcttcctgactagacggcgggggagataagccttacatctggagtctgtttttgaggaggtaaaaaagcctgaatctttgattcaggcttcataagatattgtctttccatgtttacggaattttgcaaagggtcatgcttttaatcaagcagtccctgttcgcgcatttttttctttacggtgaaaccgcttcccatcatggcgataacgagaacaatgcttccgatgatgccccatgcgcttttctcagcgattgatacgccgatcagcatcatgctgaagactgctgcgaatgcaaataataataagagccaattcaattttttcatatttccatcccctttaacgtcatactttcagtttacagaaaaacgtaacgcttttaaagaggatgtgtggtataatatgaaagttatctaatttttttaggagatgaaaatgtgaaacttcgaaacgatcttcgcaacatcgcgattattgcccacgttgaccatgggaaaacgactttggtagaccaattgcttcaccaagccggaacattccgtgccaacgaaaatattgccgaacgcgcaatggattcaaacgatcttgaacgtgaacgcggtattacaattcttgcgaaaaatactgcgattaactataaagatacacgcattaatattttggacactccgggacacgccgacttcggcggagaggtagaacggattatgaaaatggttgacggcgttctgttagtcgttgacgcttatgaaggctgcatgccgcaaacccgtttcgtactgaaaaaagcccttgagcagaacttaaatccggttgtcgtcgtaaacaaaatcgaccgtgatttcgcccgcccggaagaagtcattgatgaagtgcttgatttgttcatcgagcttgacgcaaacgaagaacagcttgagttccctgtcgtctacgcttctgcgattaacggaacggcaagtctggatccgaaaaagcaggacgaaaacatggaatcactgtatgaaacgattcttgaacatgtccctgccccggtagataacgccgaagagcctcttcaattccaagtggcgctgcttgattacaatgattatgtcggccgtatcggtatcggacgcgttttccgcggaacgatgaaagtgggtcagcaggtttcattgatgaaacttgacggaacggttaaatcattccgtgtaacgaaaatcttcggtttccaaggattgaaacgcgtggaaattgaagaagcgagagcgggagaccttgttgccgtttcgggcatggaagacatcaacgtcggtgaaacggtttgtccggctgaccaccatgagccgctgccggttctgcgcattgatgagcctacgcttcaaatgacatttgtcgtaaacaacagcccgtttgcaggccgtgaaggcaaatatgtcacagcccgcaaaattgaagagcgtctgaatgcgcagcttcaaactgacgtcagtcttcgtgtcgaaccgactgcatcaccagacgcatgggttgtttcaggacgcggtgagcttcacctgtccattttaattgaaaacatgcgccgtgaaggctatgagcttcaagtgtctaaacctgaagttatcattaaggaaattgacggcgtcagctgcgagcctgttgagcgcgtgcagattgacgtgcctgaagagcataccggttctgttatggaatcaatgggtgcgagaaaaggcgaaatgcttgatatgattaataacggaaacggccaggtccgcctgatctttaccgtaccttcacgcggactcatcggctattctactgagtttctgtcactgacacgcggtttcggtatcctgaaccacacgtttgacagctatcagccgatgcaaaaaggccaagtcggaggccgacgtcagggtgtgctcgtttccatggaaaacggaaaagcgacatcttacggaattcaaggtattgaagaccgcggcgtcatcttcgttgagcccggaacagaagtgtatgaaggcatgattgtcggcgaacataaccgtgacaatgaccttgttgtcaatgtcagcaaaatgaaacagcagacaaacgtacgttccgctacgaaggatcaaacgactacgattaagaaagcgcgcattatgtcgcttgaagaatcactcgagtacttaaacgaggatgaatactgcgaagtaacgccggaatccatccgtttaagaaagaaaatcctgaataaaaacgaacgtgaaaaagcggcgaaaaagaaaaaaacagcaggaatgtcttaatcacttgcagaatttgaaaaggtagaacccgaacggaaaaggggagggggatctttttgaatgaagtaagtgaacggctgtcgttctttgcggctctttaccaagtggatgagcatccgctggcgggaatgtggctgttatacggaacgatcgtcgtgctttcggtgattgtatttaaactcggctttgccaaacggctgccggttttgaaggctgcggcagtttatctctttctcgtgctcggctgcaccgtgctgacttttttcggtgtgtttttgccggtcggagaagggcttgttgtcgccgccttgattttgatcatttacaaaatccgtctgcaccagtccaaaaaaagccagtcagctaaaccgcaataaaaaaatgaccttgccttccggcgggtcattttttattgcggtttattttttcagtttatcttttttcgctttttgtccaggatgaaaggaaaagtgtccggtattcagccgcgcctccgttttgattttgattcggtcatggcattcccggcacatatatgtatgaatcggacgattgcggaggcgtttggctgtcagtgtttcatcatcaatttgttcaattttgtcgcaaatggaacattttactctcattgattttcacctctttcactatgacaagcattatatcatggatgcccctcctgccaaagggaaagaaagcagcgcccttcttttggagcgggcgctgctttttactggcggtttttcatatgatgatccgattgatcgttctgttcgttctgcagcttgttctggtctctttggttcagctgatcatcattcgattgagtcggtgattctttttcattgtcggtcacatcattcgggacttccggcatgacacgaccgacgatggcggcaagttcgtccaaaatgcctgaaacggggcggccggctttaatgtcgctgcccatgcctctcagacgggaaaccgtatcaggatcagccacgacaacggcattggcgccgtaaggatcgttttttaacgcctgggcgaccgtgtatttaatgctctccactttgcttctttctaaattgtcatccacatcgattccgacaacggagtatcttccgagtacaaccgcggtggcatctgaaatgccggggattttttcggttacctcgacgagatgcttagcgatgtctgtccggccgggattttcagctgtctcaggagccgtattttttacatgaatcggttttgcatcacgctgatcggttgattcgttctggatattgcggccgcggccgtcctgtacagcagtgcagccggtcaggataaacaaggcttgtatgataatgaaaagaattcgcacgtcagattccctccttgaatgctttcatttattttattgttgaattaaccttctatctttattcaccaaatcatatattttagcaggcatccccgtttttcgcggaaagagaagcacacgatgggctttgatccttatttcaggaggctgagacttgagtaaaatttatgtgttagatacgaatgtacttttgcaggatcctaacgccattttttcctttgaagaaaacgaagttgtcatccccgccgtcgtgctggaagaggtcgattcaaaaaagcggtatatggacgaggtcgggagaaatgcgaggcacgtatctaagctgatagacgggctcagggagaaaggaaggctgcacgagaaagttccgcttcaaagcggaggaacgctcagaattgaactgaaccaccggtcatttcatcagctccaagaaatttttatcgaaaaaacgaatgataaccgcattttggcggtggcaaaaaatttaagccttgaggaggaaacgaaagaaaacggccgcctcgtcatcctggtcagcaaagatgtgcttgtcagggtaaaggcggatgccatcgggcttttggcggaggactttttaaacgacagagtcgttgaccatcatgaaatatatagcgggtacaaagatatatttatgaataaagagcggtttgcctcgttttataaaaacaaacaaattccagtcaaggagcttcagcagcatcaggtttatccgaatcaatttgtgctgatgaaagatgaattaggaggatcttcgtctgcggtcggcatggcggataagaaaggagagaccgtaaaaagactcgttttcgatgatgagcacgtatgggggatcaggccgaagaacgtccagcagacaatggcgctcgaactcctgctgagggaagatatcccgcttgtcaccctgatcggaaaagcgggaacgggaaaaaccttgcttgctctcgcggcagggcttctgcagacggaggatctcggtatttataaaaagctgatcgtcgcgcgtcccatcgtcccggtgggaaaggatatcggatatttgccgggcgaaaaagaggaaaagctcaagccgtggatgcagccgatctttgataatcttgaatttttattcaatgcgaaaaagccgggtgaacttgaagcgattttggcaggaatcggatcgattcaggtggaggcgctgacatacattcggggaagaagcattccggatcagtttattattatagatgaggctcagaatctgacgaggcacgaggtcaaaacgcttttgacaagggtgggagagggcagcaaaattgtcctgatgggcgatccggagcaaatagatcacccatacttagacagtttaaacaacggacttgcttatgttgtagagcggtttaaaggacaaaccgtctccggcagcgtgaagcttgtgaaaggtgagagatccggccttgcacagcttgccgccgatttgttataaaacttcgatttctgtgacgcccgttatcggtttttcaaagtctccgtccacgtaaaaatggaccggaccgccgtcttgaagcggtttccccgcatcgctgaaatgcgcgattgcgtccatcgccttttcaagcggcacttcggttctttctgattttgaaataaatgcgcacaggacagcgctttctttcggctcggcatttgctaaaacagcgccgagcttcatggcgaagctgccgttcatcagtctttctttttcataacgtttttcactttttaaagtcggcggcgaaatgcgcccttctctgatcacccgttcaggatcaagcgtatgctcctgggtttctgcagagccgtcctgatgaacaggctgattgttttcaaacggaaatttgcggtcatcgaaaatccagacactcggatcaattgtaatcgggtatgtaacattgccttttacttgaataacgctcatgttgaagcccccctttacttaaagtataaaagttttcgcatgaattgtcactttgcgttgcaaattagatgtatacaacggcagcgaagtgaggatgatcgacatggtatgccggcattaccaagagctggacgcattagttcaggaagcgaaaaaaagaaccggagaaggcaaagtggcagactatattccggctctggctgaatctgaacaagacagcctttcggtcacgatttatcatgcggaaaatacatgtctgacggcaggagacgccgaccggacatttacgctgcagagcatttcgaaagtgctttctctggcgctcgtactgatggattacggaaaggaaaaggtgttcagctgcgtgggtcaggagccgaccggcgacccgtttaactccatgattaagcttgaaacagtgaatccgggcaagcctttaaatccgatgattaatgcgggagctctcatcgttacgggtttaattaaagggcattcgccgaaagaccgcctggattacctgctcggattcatcagaagacttgcgaacaatcaggacattacatattgcagacatgtcgcggaatcggaattcaaatcttccatgattaatcgggccatgtgttattacatgaagcagtatgacatttttaaaggcgatgttgaagaggtcatggatttgtatacaaaacagtgcgcgattaagatgagcagtctggatttagccaaaatcggctgtgtattcgcccttgacggcaagcatccggaaaccggggagcaggtcattaaaaaagatgtggcgagaatctgcaagacgtttatggtgacatgcggcatgtacaatgcgagcggggaattcgcaatcaaggtcggcattcccgctaaaagcggcgtttcgggaggaatcatgggcatttcgccgtacaacttcggaatcggtatattcggcccggcgcttgatgaaaaaggcaacagcatcgcgggtgtgaagcttttggaaatcatgtctgagaaatacaggctgagtattttttgaaacattttttatcataacatctgcttaaatcctcttgcaatttcatctgataccctttatgataaatagaagaattaggtactcgcctggggaacggagggatacttttggcttcagagattatagttgaccatcagcagaaagcattcgagctgttgaagttagatgctgagaagattttgaagctgatccgagtacaaatggataacttaacgatgcctcaatgtcctctgtatgaagaggtcttggatactcagatgttcggactgtcgagggaaatcgattttgctgtccgcctgggattagttgacgaaaacgacggcaaagagctgctggacagacttgaaagagaactgtctgctttgcatgacgcgtttacaggaaaataaatgatcaaactcaaactattcaacggtttgggtttttttataaccgtaaaccgtttttttgcatcttcttttcgtaagacggtctcttaatctgcatttcatccgaaaaactataaagaaactgcgtaaattgtttatgaattatagtaaaatataatacgcaataggtattaaacgtaagctttaagcaggaaagaggatgttatgtttaaaagaatgttaaaatcttacgattattcattgatatgcgctatcattctgctgtgcagtttcggattggtaatggtatacagctcaagcatgattaccgccgttatgcgttacggcgtgagcagcgactatttctttaaacggcagctgttcgccgtcatcgcggggtttgtgctgtttattatcgcggccgtttttccgtacaaagtgttcgcccatcaaaagattcagaaaatcatactgcttgcgtcagtggctgcgctttgcgcgctgtttgttttcggacatgttgccggaaatgcgcaaagctggtttaaaatcggcggaatggccattcagccgggggaatttgtcaagctgaccctgatactgtatcttgccgcggtgtacgcaaagaaacaaagctacatcgatcagcttttgacgggggttgcgccgccggtgatcgtcaccgtagtcatttgtgcgcttatcgctattcagcccgacttcggaacggcgatgattatcggtctgatcgcgttttgcgtcattatgtgttcgggattcagcggaaggaccctgctcaggctggttctcatggcgggaatcgtattactccttgtcagcccgatcatttatctgaaatgggacgatattttgacacccgggcgtatgagccggtttgaaagccttgaaaatccatttaaatacgccagcacatcaggtctgcagattataaattcgtattatgcgatcggctcaggcggttttttcggtctcggtcttggagaaagcattcaaaaatacggttatctgcctgaatcgcatacagactttattatggcggttatttcagaggagctcggcattttcggcgtcctgtttgtcattgtgctgctggcttttgtggtgttaaaaggtttttatattgcgagaaaatgtgaagatccgttcggaagccttttggcaatcgggatatccagcatgattgcgattcagacctttatcaatctcggcggtgtcagcggtttaattccgatcacaggtgttccgctgccgtttatcagctacgggggatcatcaatgtttttgttattgacgagcgccggtatattggtgaatgtcagcatgcatgtcaagtactcagaaaagaagaaaaagagggagcccgttccgtctaaaggggtaaaaagacggcagacggaaaaatctgtgtatctctaaaaaacaagtgtatacacagggcggatattcctttattataaactacatatttattaggccaagggggagaaaagtttgtcacaacaatccatccaaaaagtgttagtagcaaacaggggagaaattgcgatccggattttccgggcgtgcacagaattgaacatcagaacggtagccgtttattcaaaagaagattcgggctcctatcatcgctataaagcggatgaagcttatcttgtgggcgaaggcaaaaaaccgattgacgcgtatcttgatattgaagggattattgagatcgcaaaaagaaacggcgttgatgccattcatccgggctacggatttctctctgaaaatatccaatttgcgagacgctgtgaagaagaggacatcgtattcatcggaccgacgtcagcgcatttggatatgttcggagataaggtaaaggcgagggagcaggcggaaaaagccggtatccccgttattccggggagtgacggaccggctgaaacattaaaagatgtcgaacaattcgcaaaagtccacggatttccgtttattattaaagcatcgctcggaggcggaggccgcggcatgagaatcgtccgaagcgaaagcgaattgaaagaatcgtttgagcgggccaaatcagaagcgaaagccgcattcggaaatgatgaagtgtatgttgaaaaactgatcgaaaatcctaagcatattgaagttcaggtgatcggagataaagaaggcaatgtcgtccatctgtatgagcgggactgttccgttcagagacgccatcaaaaggtcattgaagtggcgccgagtgtatctttgcagcctgaattaagggacgaaatctgtgaagcggctgtggcgcttgcgaaaaatgtcggctatatcaacgcggggaccgtggaatttctcgtagcgggcggtgaattttactttattgaagtgaacccgcgcgtacaagtggagcatacgattacggaaatgataacgggggttgatatcgttcagacgcagattctcgtcgcgcagggccacggactgcacagccgcgccgtcaatatcccagagcagaaagacatttttacaaacgggtatgcgatacaatcacgtgtgaccactgaagatccgctgaatgactttatgcctgacacgggtaaaattatggcttaccgctcaggcggcggtttcggcgtccgccttgatacgggaaacagcttccagggcgccgtcatcacaccttattatgattcactgctcgtcaagctgtcgacatgggcgctgacgtttgaacaggcatcagcgaaaatggtccgcaacctgcaggaattcaggatcaggggcattaagaccaatattccgtttcttgaaaacgtggcaaagcatgaaaaattcctgacgggccaatacgacacatcgtttatcgacacaacgcctgagctgtttgttttcccaaaacagaaggaccgcggaacaaaaatgctttcctatatcggcaatgtcacggtgaacggttttccgggaatcgggaaaaaagaaaaacctgcatttgataagcctcagaccgttacgttagatatcggggaaaagccggcaagcggtacgaaacagattcttgatgaaagaggcgccgagggacttgcagactgggtgaaagagcaaaaatccgtgctcctgaccgatacaacgttcagggatgcccatcagtccctgctcgcaacacggatcaggtccaacgatttgaaaaaaatcgcgaatcctacggctgccctgtggcctgaactgttcagccttgaaatgtggggaggcgcgacatttgatgtagcgtaccgtttcttaaaagaagacccttggaaacgccttgaagatctccgtaaggaagtgccgaacacattgttccagatgctccttcgttcatcaaatgccgtcggttatacaaactatcccgacaatgtcattcaaaaatttgtccggcagtcagcggagtccggtatcgacgtattccggatctttgacagcctgaactgggtaaaagggatgacgctggccatcgatgccgtccgtgaaaccggaaaagtggcggaggctgcgatttgttacacgggagatattcttgataagacccggacgaaatatgatttgcaatattatctttctatggcgaaagagcttgaggcgtctggtgcgcacattctcggcattaaagacatggccggtcttttgaaacctcaagccgcatacgaacttgtctcagcgctgaaggaaacgattgatattcccgttcatcttcatacgcatgatacgagcggcaatggcgtctttctctatgccaaagctgttgaagcgggtgtggacatcgtggatgtcgccgtcagctcaatggcgggtctgacttcacagccgagcgcaagcggattttatcatgcgcttgaaggaaacagccgccgtcctgaaatggatgtccggcaggtggaaagactgtcacaatattgggaatccgtccgtcagtattacagtgaatttgaaagcgggatgaagtctccgcatactgagatttataatcatgaaatgccgggcgggcagtacagcaatctgcagcagcaggcaaaaggagtcggcctgggcgatcgctggaatgaggtgaaagacatgtacagcgttgtcaaccgcatgttcggcgacgtcgtgaaagtaacaccttcttccaaagtcgtcggagatatggcgctttacatggtgcaaaacaatttaacagaacaagatgtttatgataaaggcgaaacgcttgattttccggattcagtcgttgagctctttaaagggcagatcggtcagccgcacggcggatttccggaaaaactgcaaaagctcgttctgaaaggacagacgccgatcacggtaagaccgggtgagctgcttgaaccggtatcttttgaaggcattaaagaagaatggaaagaaacgcatcagatggaattgagtgatcaggacgcaatcgcgtatgctctttatccgaaagtatttactgaatatgttaaaacggctgaacgcttcggtgatatttccgtattggacacaccgactttcttctacggcatgacactcggtgaagaaatcgaagtggaaatcgagcgcggaaaaacgctgatcgtgaagcttgtatctatcggtgaaccgcagccagatgcgacacgtgtcgtttatttcgaattgaacggccagccgcgcgaagtggtcattaaagatgaaagcattaaatcgtccgtacaggaaaaattaaaagcagatcggacaaacccaagccacattgcggcatccatgccgggaacggttattaaattgttaacggaaaccggggcaaaggtgaataaaggcgatcatctgatgattaatgaagcgatgaaaatggagacgacggtacaggcgccgttctccgggacaatacagcagattcatgtgaaaaacggtgaaccgattcagacaggcgatttactgatcgaaattgaaaaagcgtaaaaaataaacataaaaaacctgatccgccccgtgtgcgatcaggttttttatatgtgaaaaggccgaagctttgatgcttcggccttttcatgtgcctcagatgttccgctgttttgattcatagcggaagcgggcgattaataataagaaatagcataagacaccgaacagaccggcaataaagagcgaatgggcaagtgcaaagccggtggccatttctgaataaacaaccatgattccggagagcgcctgtaatacaacaaaggcaagagccgctatccagcccccaagaatctgtttttggtctttgtaggagcgcaccgcatgcgcaaaagcgacaagaatccatacgaacagaagcagcgctgccgttctgtggcccatctgcacccactcctgaaaatgagacggaagtccgtggttcagtctgctgcaaagcggaacgtcaggacaggcaaggcttgattttgtatggcgcacataagcccccgtataaacgacgatatacgtgtaaatcgaaaggccgatcatatgaaactgcattttcctgccgattctgagcggcttgacgagctttttgtctgatttatcagcttcaaatatgagcagcgtcaaaatcagaacagaagcgaaagaaatcagcgatatgccgaaatgaagcgccataacgagcgcatttgatccgaaaacaaccgctaatgcgccgagaagcgcctgtaaaaataaaaagataatggacataatggcgagaaaggttgtttcacggaaaacaggcgtgacttttctccatgcccaaaaagcgagactcagcacgagaacgattgagacaccgcttgcgagtctgtggctccattcaatgatagaagcggcgttaagctccgggaaaaaccggccgtggcaaagcggccactgccttccgcatccgagacccgatcctgtttttgtgacaagagcgccgccgatcagcacgacgagcataacgaacgtcgtcagcacgccgagcgctttcaaagctttattcattttacattcaccttcttaacaaactggacaaaatgatatacgtaccaagtgtaagcgaatatgtgttttgtggcaattctcaattctgtttgttcacaaaaatataatagaatcaggacttcttagataatggggttgattattccagatgggtctgatagaaataaagtaaccgctttattatgaagccggcggatttggtaaaattcataaaaagttcacaaataaattcctgtttctcgtttaatatttaagaggatgtttttttacaggtcattatcttgtatgatagagttgcaggtcttaaaaaacctgctttaggtttgtaagggaggtttacgttatggctaattccagaattttaaacgatacagctatagacggacagattgaagagacgacggcatggaaggatttcctttcgcttatcaaaataggaatcgtcaattcgaatttaattacgacttttaccggcatgtggcttgcgttacatatatccggtctgagttttttaggcaatttaaacaccgtgcttcttacattaataggatcttctttgatcatcgccggttcttgtgcggttaacaactattacgaccgtgatattgatcatttaatggaacgcacgaaagtaagaccgacggtaaccggaaagattcagccgaatcaagcgctgtggtcaggaattttactcattgctttaggacttatcatgcttttgatgaccaccgtgatggcagcagtcatcggttttatcggcgtgtttacgtacgttgttctttatacaatgtggacgaaacgccgttatacgattaatacggttgtcggaagtgtatcaggcgccgtgccgccgttaatcggctggacagcggttgaagggcacatcggtgttgtcgcgtgggttttattcatgattttattcatctggcagattccgcactttttagcgcttgcgattaaaaagacggaagattacagagcagcgaatattccgatgcttccggtagtgcacggctttgaagtgacgaaaagacagattatcgtctgggtcgcatgcctgctgccgcttccgtttttcctcggcagtctcggtcttccgatcgtcattctcggcactttgctgaatgtcggatggcttgttctcggactgatgggattccgcatgaaaaacatcatgaagtgggcaacccttatgtttgtctattcgcttaactacatgaccatttattttgtagcgatggtggtcttcacgctgttttaattgaataatgagcttgtttgatcgccaaaacaaacaatgacaactagtaaacgccgccttgaccttttgtttaatcaggcggctttgcttttatacatagatggaattttaagtaaaaaatctcatattttaagaaatgaggaaatgaagtatttcggctggaagcagatttactgcttgtgcatctcgtactgattcaaaaaaggggttgggtgaaatgttaaagcgttggcgtcttttatcattattagccttagtgccgcttttattgagcggctgtggaaaaccgtttctgtccacactcaagcctgccggcgaagtggctgataaacaatatgatctgacggtgctcagcacacttatcatggttgtcgtcgttgcggtcgtagcagttattttcttttacgtcattgtgagattcagacggtcgcgtataggggaagacacgataccgaaacaggtggaggggaaccgttttttagaaatcacctggaccgttattccgatcctgcttctgattattcttgtcattccggttgtcatcgatacattggcactggcggatacgtcgccgatggataagaaaaaccgtaaagcagaggatgcgctcgtgattaatgtaagggcgaatttatactggtgggaattcgagtatcccgattacgggtttgtgacaagtcaggagctgatcgttcccacagatgaacgcgtctatttcaagctgaagtcctcagatgtgaaacactctttctggattccgtcagccgggggaaaaatcgatacgaatacggataatgacaacactttctttctgaccttcgattctaaacgcagcaaagaagcgggagaatatttcttcgggaaatgcgcagagctgtgcggaccttcacatgcgctgatggatttcaaagtgaaaccgctgccgtcaaaagaatttaaacaatggacgaaagcgatgaaaaattataagcatacaacagattccgatttagcagcacaaggagaagagctgtttaaggaaaaaaactgcctgagctgtcatgcggttgagcccaatgataaacgggctgaagcggcaagaacggctccgaacctcgctaccttcggtgaacgggtcaaagtggccggcattaaggatgcgaataaagagaatataaaagcctggctgaaaaatccggacagcattaaaccgggcaataaaatgacaggcacttatccgaagctctcggacgctgaaacggatgcgctgtatgaatatttaaaagggctgaaagcggagaacaagtgaggacagggagatatcagggggaggtcgcaaatgatgaatacgcttacaggacagcaaagaaaaagctctttgctttgggattatttgacgacggttgaccataagaaaatcgcgattttatatatgatcgccgggggatttttcttcgtcgtcggcggacttgaggccatgcttatcaggattcagctcttgaggccggggaacgattttatgggtgctcagcagtttaatgaaattatgacgatgcacggcacgacaatgatcttcctggcggcaatgccgctgttattcgggctgatgaacgcggttgtgccgctgcagatcggggcgcgtgacgtatcattcccatttttgaatgcgctcggattttggctgtttttcttcggaggcatctttttgaatctgagctggtttttagggggcgctcctgatgcaggctggacgtcgtacgcgtcgcttgcgctgaattcgaaagggcacggcatagactttttcgtgctcggcctgcaaatatcaggcttaggtacgctcattgcggggatcaattttctcgccacgattattaatatgagggcgccgggtttaacgtatatgagactgccgctgtttacgtggacgacatttgtggcgtcggcactcattttattcgcatttcctccgctcaccgtcggtttggcgctgatgatgctggatcgtttgttcggaacgaatttctttaatcctgaattgggcggcaatacgataatctgggagcatctgttttggattttcgggcatccggaagtatacattttaattcttcccgcctttgggattttttcagaaatcattcccgtatttgcgaggaaacgtctgttcggttattcgtctatggtctttgcgatcgtgctgatcggctttctcgggttcatggtatgggttcaccacatgtttacaacgggactcggaccgatcgctaatgcgatatttgcggttgcgacgatggcgatcgcggtgcctaccggcattaaaattttcaactggcttttgaccatctggggaggaaacgtcaaattcacgacgcctatgctgtatgccgtcgcctttattccttctttcgtactcggaggagtcacgggtgtcatgctggcggccgcagcggcagattatcagttccacgatacgtattttgtcgtagcgcatttccactacgtcattatcggcggcgttgtgttcggcatcctggcgggcgtgcatttctggtggccgaaaatgttcgggaaggtgcttcatgaaacgatggggaaaatttcgttcgtcttattttttatcgggtttcatcttaccttcttcattcagcattttctcggcttgatgggaatgccgcgccgcgtttacacatatctgcccggccaggggcttgataccggcaacctgatcagttcaatcggcgcgtttttcatggcaggcgcggccgctttactcgtcgtcaatattatttatacctcaataaaggggaaatacgtcgggaacgacccgtggctggacggtcgtacgcttgaatgggcggtctcttcgccgccgccggaatataattttaaacagcttccgtttgtccggggacttgacccgctgtggattgaaaagcaggccggaaatgaagggatggcgcctgcagagcctgtagaggacattcatatgccgaacggctccatcatgccgtttatcatatctttcgggctgtttgtggcagcgttcgggtttttataccactccgattattcatgggggcttccggttatcttcatagggctcggcatcacattctttaccatgctgcttcgctctgtggtcgatgattacggctatcatattcacaaagaagatctgccgaatgatgataaaggggtgaaggcgtaatgcagctgcaggaaaaaatgacggctgaaacctttccggcttctcctgaaaaagcaacgctggaggggaaaaataagtttttgggattttggctgtttctcggcggcgaaacggttctgttcgcctcgctatttgcgacattccttgctttacgggaatctaaagccggagggccgtcaacggctgagatgtttgagctgccgatcgtgtttatcgcgacgatgcttcttttgacgagcagcttaacgagtgtgtatgcgatgtatcatatgaaaaatttctcctttaaaaaaatgcaggtgtggcttctggttaccgtattattgggagcgggatttttaggggttgaaatctatgaatttatgcattacactcacgagttcggatttaccattacaagctctgcgctcggctcagcgttttacacgctcgtcggcacacacggagcacacgtggcgttcgggctgttgtggatcagcgcgctcatgatccggaatgcgaaaagagggctcagcctttataatgcgccgaaatattatgtggccagcttatattggcattttatcgatgtcgtgtgggtctttatctttaccgttgtatatttgatggggatggtgggataacgatggacgataacaaaaacagagagactgtcagtacggatcttgaatatcggagaaggaaaaatgccgaggagatgaaatatcaggtcatctccttcggcttgatgatcggccttacgcttgtcgcgtttttgacggtggctgcagacggcattgccggatggtttacgatgccgtttctgatcctgcttgcggtcattcaggtcatctttcagctgttttactttatgcatatgagccagaaggggcatgaagcgccgtcattatttctgtattcgggaatatttgtcgcgtttatcaccgtgcttgcatttgtcacgattatttggtggtaatcggggcggcggggagtgagagatttgattaatttggaaatgttcgggtttcgcgcaatgtggagcccgtatctgttttgtataactgccgtgataacaggtgtttacttttactggtgcagccggcataaaggacgtgtggccgttaaggagaaggtgctgtttgtgctttccgcgctatttttttacgcggctgcgggaagtccggtcgatttattgggccatgtgatgttcagcgcccatatggcgcagatggcggttctgtttttagtcgtaccgccgctgttgatctccggaattcccggctgggcatggaaaaaactgatcttccgtcctgtcgtaaagccgctgttttcatttttttcaatgccgcttatcgctttagtgctgtttaacggtattttttcgctgtatcacatcccgtttatatttgatttcgtcaaaacggattcgctgtatcacacgctgatgaacggactcatctttgtaacggcgttttttatgtggtggccgcttgtgcataaggtggacggtctgccccgtctcagcggtttaatgaagctggggtatattatggcggacgggattttgttaacgccggcctgcgcgctcattatgttcagcggggcgcccatgtatgccacgtatacagatccggcggcttgggccgaagcaatgaagctttgcgttcctttagatttgctggaggagatccctttatccgggccggagatgtttaacacgctacctcctctggaagatcagcagcttggggcagtgctgatgaaaatcattcaagaggcggtctacggaatatatttggctgtcatcttttttcagtgggtcagaacggaacgggaaaaagatacgctgtcagagccgccgtatatcgagcataccgtctcataaaaaaaagtacagcagaatatgctgtacttttttattacatttgcactgtttttaatgactcttccaattcaagcagtaaagctttgctttcagcgatgacatgttccggaaattcttcagcgctgccgtattctacgccgtgcggataataatgctttcctaaaagaggggccttcagctgaatcacggcccgtctgccgccgacatcgccctcttttgccgttccttgaatccgcagataaaatgtccctcaggtactgaaaactttttgtcgtaagtcactctttcataatcccattgtccagccagaatgagccctttgccttccatcagatcgttcaagcggctgagctccgctgttaccccttcaagaccgctgttttcaaacttcaaaccttccccctccttttaaaaatgccctttcctgacaatcatagtatgaaagcgttacactttcaatgattcatacggtgaaagtatgcaaaaacaaaaatttgacgacaatagtagcagaaaaaaggaggaattccgcaatgacaaagatcaataagctcatgacgtcagacttgcaatattgtacagtattagataatgtatatgaagctgcggtgaagatgaaagacgcggatgtcggcgccattccgatagtggatgaagacggcgccacacttgtcgggatcgtgacagacagagatctcgtattacggggaattgcttcaaaaaagccgaactctcaaaaaataaccgacgcaatgacagagcgggttatcagtgcagaagaagacgcctctgtggaggaggtgctccatttgatggctgaacatcagctcagaagaattcccgtcacaagggataaaaaactggtcggcattgttacgctcggcgatctttcgttggccgagcaatcaaatgagcaagcaggccgggcgctgtctgacatttctgaagacggaggtccggaggggtttatccattaaacataaatcacggacgatgcaaataggctgtactgtataagagtacacaaaaacagaacggtttgatgatatggggtgagaggttgaaaaatattgcaagggctctcgttatccttttgcttatttacggagcgtatgttctgtttatacaatatggatcggctcctcagaaaaagaccaatcaggaggagcctcaggtttccaatgaagaagagagcggaaaacggctgaaaatgccgtcatccggactgctttctctcatggggaaatctgccgccgatgtgaaaaagaaacttggggaaccgtcccggaaagatccttctgcctacgattacgagtggtgggtgtacaaccaggggaaagaccaatacgtacaagtcggtattttgaatgataaagccgtgactttatacgcttcgggaagcggcatcaacgcaaaaccgtttaagatcggcgaatcgacgggcgaagtttttaaaacgacgcaggtttctccttttgtcaatgtgactgacaagggaaacacgtatcggtttgagttttccgaagaagatatcaatacccgtcccaccgtcaagataggcggaatgtatgttcagctgtacatggacaaatttgacgggaatctgtcaagcatcagggcttttgatgcggaaacgctggtgaaacaaaggccgtatgaggtcatgtacagaggaaagctgacagaacccgagccagtttctgataaaaaatggaacgacattgaacgagcgagtgaacagcagattctcgacattacaaatgtcatccgcgtgaaacacggactggcaaggctgaaatgggacgaaggcgccgcgaaagtggcattcggccacagcaaggacatgaaggataacaagtatttctctcacgtctcaaagaaatacgggactctgaaggaccgcttggaaaaaggcgatgtgaaataccgggaggccggtgaaaatattgcctacaactatgtggacggtcctgcagccgtggagggctggctgaacagcgaaggccacaggaaggcgctgttaagcccggattatacgcacctcggtgtcggcgtggaccggaagtattatacgcaaaacttcattaagccttggcagtaaaaaaccgcagaggggcgcgtcccccgcggtttttttatgatttttcgcgagcggcgctcctgctgaaaaaaatatacctgctttttttcgcaatttaggcgaacattaaggcgcatgaaccgatacattatagcaggcaaaacttttcggagggggtgagaattgtggcgaatcagcaatcacggcaatcaatcgatgattttaaacaattcgtaaaaaagcatcccaaactgatccaaaatgttcgcaaggaacaaagaagctggcaggaagtctatgaaaactgggttctcctgggcgaggatgattcgatgtgggacccttttaaagacgaggccgttcagccttcttccgacgcggaaaccaaacaggaaccagctgaaaagaacgatttcgtttcaaaaatggtcactgccgtcaaaaagatggatatcaaccaaatgaatgagcagatcaataaaatgagccagtccatttcatcattgcaaagccttttaagccaattttcggggagcagcacgaagcagccccggcaaggctccggacaacatcctttttcattcagaaaggattaaagaaggggatcgtgtatgcgaaaagaggttcaggaattcatatccgcagatgaggaacggaaacggtttatacggcagcgtcccgtctggtaccgcagacttgcgagaaaaccggacgatctcaattcctttcagcttgacatgatgaatttttatgaaaagacgataccgcatcgggtaagtcaattctcaaacgggattcaaatggcgcagatgatgatgcagatggtacacgccatgcgttcgcaggattaaaaagcgtttaaacgccgcattttccaattgggtggtttcatggtaaactagcaactggaggtgcgtatttatgtatgcaacaattgagtccgtcaagcttcaaagtgaagcggaacagcttgccggcatgattctgcagtctgagacggctgaaaattaccgcgattgttacaagcgtctccgtgaagatgaagaggcagggcggatcattcgttcttttatgagcgttaaagagcagtatgaggatgtgcagcgctttggcaaataccatcctgattatagagagatttcccgcaaaatgagagaaatgaagcgggagctcgatttaaacgataaggtggccgaatttaaaaaagcggagactgagcttcagtcgctgcttgacgagatcagcattgaactcggaacggccgtctcggagcatgtaaaagtgccgacggggaatccttattttgacggcctgtcatcctgcggcggcggctgcggttccggcggcggctgcggatgcaaagtttcctgacgagacggccgtctcgtcttttacataaaatgaacagaaagtcaggcgggtgatcatgatggaaaataagcgccaaggcataatcgtatatctgcattctttaaaacacagcaaaatgctgagaaaattcggcaacgttcattatgtttccaagcggctgaaatacgttgtgctgtattgcgatatggacctgatcgaaaaaacaatggaaaagatttcttcttattcttatgtgaagaaggtagagccttcttataaaccttttttaaagctggaatttgaatcaaagcttgataaagcgaaagagtacgattataaagtcggtatataaaaaaatccccgcagatacctgcggggtccttctattccttaacaagttaaggagaaggaaaagggagaggagaaaccggaggaagaacttatggggaaacgtaagtcttctccgcggttggcaacaacatcattcattgatgctgttacacgtagtcttgacaggaatgtgaatatgtatacacgtttttcacgttcattgtttgaaagaatgctttatgataagatagggattgtttttatacataacggctcagccgatgagaaacatcaaagttttcagaaaaagtggtgtgaataatgagagtaatttccggttcaagaaaaggacgagccttaaaggcggtgccgggcacatcaacaaggccgacgacggataaagtaaaagagtctatttttaatatgatcggcccgtattttgacggaggaacagggctggatttgtttgcggggagcggcggcctcgggattgaagcgctgtcgcgcggatttgaccgctgtatctttgtggatcgtgatttcaaagccatccaaacggtaaaagcgaatatcaaagcgctcgatctgctgtcttcatcggaagtataccgcaatgatgcagagcgggccctctatgccgcggcgaaacgggaaaaaggttttgacggaattttcttagatcctccgtataaggaacaaaagctgaaagcgcttatcgaaatgattgatgagcagaacatgctgaatgaagacggttttgtcgtagccgagcatgataaagccgttgtgcttcctgaagccgtcggcgcgctttctgtaacaagaagggaaatttacgggcttacaggagtgacgatataccgaaatagggggtaatgatgtggcaagtatagctgtatgtcccggaagttttgatcccgtcacctacggacacctggacattatcagacggggggcaaacgtgtttgagcaggtgtacgtatgcgtgctcaataattcttctaagcagccgctgtttacagtcgaggaacgctgtgagctgttaagagaagtgacaaaagacattccgaatattacggtcgagacgtcacagggactgttaatcgactatgcgaaaaaaaagcgggcgaaggcgattatcagggggctcagagctgtttctgacttcgaatatgagatgcaggggacttccgtcaaccgcgtgcttgacgaatcaatagaaactttttttatgatgacgaacaatcagtactcttttttaagttcaagcatcgtaaaagaagtcgcaaaatataacgggcctgtttcagagtttgttcctccggaagttgaacaggcgctgaagcagaaatttaaaggatgagaagcgctgatcggcgtctcatcctttttttgtccgtgctgacagcctgtaacaataaatcaatgcgtatacggcgagagctgtcagcgtgatggcgggcccggtttcaacaagtgtattccatccgctgacggcagcagatcccgcgtcctgatcgcggaaagggaggaatacggactggtaaggttcgtccaatgcaaggtaaagcggcttccacagtaagagaataaagagtgcggcataaatgccctgaaggatacgcgccgcgaaaaacggtttaaagcggatatctgtttccgataaaatgccggctacctgggcctgtacggaaaggccgctgaacccgagaataaaactcacaatcatggctttcggcagcaaggcggcatcagcttcactgaccagcttgctcccaagtgtaatttcaaacattccgctgataagagggatgtccagatttgccggaagatgaaaaagggaaagcagcgcgtttgtaaatacagaaagcacatccatgacttgtacgattgataataaccggctgaaaaccgaaaacaatataataaaaccgcccaccatcagcaaggtttgtacagaagaggtgacggcgtcgcccaaaatttttccgagcggccgcttttccgaaagccgcgccttgtggagggccagaaatgcttccttcagagaagggagagcgatcgtctttttaccggtatacgccgcttcttctttccgtccgtatgaacgcatcgtcaggccgacggcgatgtttccaagatagtgagccgatgccagcagaatgccgagagacgcgttatgaaaaaagccgaccgccacggcagcgaatataaataacggattggatgaattggtaaaagagacgaggcgttcagcctctactctggagatttgtttatcctggcgcagccgtgcagtcagcttcgcgccggccggattgcctgaagccatgcccatagccagtacaaatccgccgacccccggcactctgaaaatgggacgcataaagggttcgagtaaaaggccgacaaatttgacaatgccgaatccgattaaaagctcagatagaataaaaaacggaagcaatgaaggaaaaacgacctcccaccacatggaaagaccggttttggaggcttcgaatgaggcctgagggtgtgaaataaccgtcgccgtcaaaaaaatgaaaaacaatgaaatcaaaaatgtatgaaacttagacaaattcattcttacctccccgatgctaaaattgcacactgacatttatatcatgataaaatatagaacagaccttaaaggcggccgggcaagtacctatttgtcatcctgtactaatatacgagcataggggttcaatttagaccatagaattcatgtataggatgtctattagggggttcgtcgcgttggccaaacctacaatcgggttagcgttaggttcgggaggggcaagaggcatcgctcatctcggagtgttatccagtttacataagcatcagattccaattgatatgattgccggcagcagcatgggagcattagtcgggagcttttatgcggccgggcatgacgtggctacgatgaaaaaagtcgccaaagcatttaagcggcggctgtatgcggattatacgatgccgaggctcggatttttaaaaggagaccgcatcaggcagctcgttcatgcctatacgtacggcaagccgatagaagaactgcggatcccgctcggcatcgtggcctgcgaccttcagaccggcgaaaaactcgtttttacgaaaggttcagtatccgaagccgtccgcgcgagcatcagcataccgggcgttttcgtcccgcaaaaaatgaacggacgtatgttagtcgacggcgcggtggtcgacagaataccggtgtccgccgtaaaagacatgggtgctgatatcgtcatcgcctctgacgtatcccgggtgaaaaaaacggaaaaagcggcacatatttttgatgtaatcatgcaaagtatggatatactgcaaaatgaattggtccgtcaccagaccattgccgcagacgtcatgatccgcccttctcttgaatcattcagctcaagttcttttgccaacattgatcatatgatcacagcgggcgaagaagccgcagaccggatgatcggccggattaaacaagaaatagagaactgggagggctaactcatatgaaagcaaaacattttcgctgggtgtttatcatcctgatcttattaattgctgttacatttattaagcttccgtattacattacacagccgggagaagcatcagagctgagaccgctgattaaggtggacggaggctatcctgaaaaaggaagcctttccttgatgactgtcaaagtaggccccgccaatccgtatacatatctttgggcgaaagtgcatccttacgatgaaatcgtccctgatgaaagcataaaagaagagggcgaatcggactcggattatatgaagcgccagctgcaaatgatgaaaagctcccaagaaaacgcggtcattgccgcttatcaaaaagccgggaaacaggtgaaatactcatttaacgggattttcgccagctcagtcgtctctgacatgccggcaaaaggaaaaatagaggtcggtgataaaatcatcagcgcggacgggaaaacatacgaatccgctgaaaagctgattgattatatcagcagcaaaaaagcgggggagaaagtaacgtttcacattgaacgggacacgaaagaaaagaccgttgacattgcgctgaaatcattcccggacgacccgaaaagagcgggaatcggcgtcgcgttatatacggatcggaacgtgaaagtaaagccggatctccatttcagcattgaaaatatcggcgggccttctgcgggtctcatgatgtctttagaaatttacaaccagctgacaaaacctgacgaaacaaaaggctataatatagccggaacggggacaatcgacgtggacggcaaggtcggaccgatcggcggaatcgatcagaaagtcgtcgccgcagacaaagcgggaaaagatattttctttgcgccgaatcaaaacggagctgaaaattctgattacaaaaatgcggtaaaaacggcgaaagcaatcaagtccgatatgaagatcgtccctgtcgacaccatgcaggacgcacttgactatttggatcatctgaaagtaaaaagcacctgatacaggcaggtgctttttttacgcattcaaaaaacgctgttcgtcttcatcatagcggatcggcgcttgtgaaaattcctgtttctcaaaaaatgtgcgttcaggttcttttatcggcaggctgtaaacccgtcccgccagtatgtccagatccagagcgggatgagagaaagaagagagcttgctgacgagaggtgcggtaagctcttttttctttgccgacaggtacgcctgtccttttttcgtcattccgagaagacggatataaggagcgcttgaaggctgtaagagccgatgcatgtcctcctttttcgtccgtgtcagaatgtgcgtgttcatccgctgcagcctcgtccacgtgtatcgttttgttttcaatcgttccatcatttcgcgataggatcgggcttgtctgatggtgcgcagaattctgtgctcaaggccttcttccacttcatagattcggctcaattcttcagcggacagagtgctgaggctgtattttacatatgaaaaatagtcttcggtgctgtgccatatcccgtatgaatttctgtatgcctccagctcacgcgcagacgcttccgggagaaagctccttgcggccgccgttcctttttctatcagcgctttccggatgcttgttgcgctggctatccggctgttatctccgggaagctcggcgtcatgatactgggaagcgattctggctgtcgtataaggcttcatagcggaaccgaaggcgtgtatcgctctaacgtagtgaaaaccgagaatattgttcggcttggacaaatcgagcatgtcccgccctttgaatatgtgtgaaaaagcttttgaggcggcggccggatagctgagaccctttttcagctcctctttcagaatcaggctgcagtcatcttcctttcggctgaacgcttcagacgcttcaataaagggttcgatccgcccgttttcgctgccgaaaaacaagctgctgcatcctaaatgatgaagaagcgaaacgctgccgcgcgcgaataattccgctttttgtacggcatacatataagggagctcaatgacgatatccacgccgttttccagcgccatttttgtccgggcccactttgagacggcggccggttctccgcgctgcaaaaaagggccgctcatcaccgccgccgcgacgctgctgtccgttttgatttttgcttgttccgcatgatagcggtgtccgttatgaaagggattatattcaacaaccaggccgactgctttcatatttgtcccgcctttcttgctatgttttgcttcgtgtggtacatttgcaaatgaagtgcatattttagtccgtttcgtttagtgtatgcatagcctatccggctgtcaacgattgcatgacggcggcattatgctgtaaagaaaaaatattgacaaaaacattctgaaaagctataatcatgtttgttgctttcctgaggtgatacaaatgaaatggacgatttatcagcttcatcaaatggcgaaaaagagctttgaatttgatgaaacagttgagttaaatgagctgacaaaattgaattctgacatccgccgcatttctcccgtccgggtgaagggccgcgcggagattgaatccaagcaagtttcgtttgactttacgatttcaggcgaaatggttttgccgtgctcaagaactttagttgatgtgccgtatccatttacaatcgcgacaaaagaactgtttagatttcataagtcggatgatatagaagatgaggacgttcatattgctgaagacgatatcgtcgacttaactccgatcgtaaaagaagagattcttttagaaattcctatgcaagtcttttgtgaaactgaacaaaaagaaggagccgctccccaagtggggaaggattggcaagtgatttctgaggaagacaagaaaaatcaaatcgaccccagacttgcggatctgaaaaagctcttaacacaagatgatgaatcttaactctttaaggaggtgggaataatggctgtaccttttagaagaacttctaaaatgaaaaaaagattgcgccgtacacatttcaaactaaatgtacctggtatgacagaatgcccgtcatgcggagagatgaaattgtctcaccgtgtatgtaaagcatgcggatcatacaacggcaaagacataaatgttaaaagcaattaatgtatgaagaaaagcgcgggaatctcggttcctgcgcttttctttttttttgcccctccggcctgcttccgccgaaaaaattgtgagcgccagtagtctatctaatctatcagcggcatatgtatgaggtaaatgagcaaatatggagggagatacgattgacgataacgagacaagacgcgtggacgcaagatgaagatttgctgctggccgaagtggtgctcaggcatattcgggaaggcgggacccagctttccgcttttgaagaagtcggcagagcgctgacgagaacggctgccgcctgcgggttcagatggaattcttatgtcagaaaacaatatcagtcagggatagaactggcgaaaaaacagcggaaggaattaagaaagcagatcggggtgcattccgccaatctgccgggaaccgtcaaacagcctccgatccgcagggcggaaggagaaaaagagctgtccattgatgatgtcattttgtttcttcagcaatttaaagagtcgccggccgcagcggatgtgcgtcatgaaaaagaaaaactcacagaacagctgaccgcgctgcaaaaagaagtcgaggatctgcgtgaggaaaatgaaagcttgagaaacaagctggagatgacggaagaagattataaagcgttaattgacattatggacagagcgagaaggatggtcaattcaaaagaagacgacaggaaatcggcgcagagcctgtaaaatgaaccggcctgagggcggcggcccggccggttttttattatgccgtttctccggatgtcatttcaccgtccatatcgggatgccagatgtaaggattttctcctttatcacgcgccatatcatatttaacgggctcaaaattcatcttatcccagaattctgctgatttcatgcgtgaatttgtcctgatcggcattctgaaggattttgcaaaatcaacaagcgcttttccgtatccgttgttttgatagcccggaagaacctcaagcttccaaagttccaaaaagtcctgacgctgatcaaaatacggattcgcgcctccgtttacctgatataaactcattctcgccactagtttatccccgaagtaaatcccgtaaaaaggcgaggtgctgtcattttcaatgatattatcctgaagatcttcaagcatcgacagctcctgcatcccgtattccttaaaccttttaaattcttcgagtgtcttaaagttgatgagcaggcgctctattttcaacacaaactccccctttgttgtgttctaccattattgtaaacgctttaattgaaaattccaactataatatgcttgcctgtctttttgctcaaaacgaaattgaagtaatttgcggcggcttctgctatgataatatggaaaaatgcagatatagggtgtgacagtgtgaaaatcggaattatcggcggcggagcggtaggccttttatgtgcttactacttatcgtcccgccatcaggtaacagtcattacgcggcggacggagcaggctgatgcgattaactcaggcggtatacggcttttgaaagacggaatagaatgtacggcggcatgcagagcgcaaacaggcatcacttccggattcgacctcttaatcgcagccgttaaacagcaccagctcagtgctgtgctgcgggatcttgagacggtaaaagggacgaatgtgctgtttttgcaaaacggcatgggacacatacacgacattagagattggcatacggatcattcgctttatgccggcacagttgagcacggagcaaaaaagatatcggatcatgccgttgaacatacgggagcgggagccgtaagatggagtgtattcagcgcatcccggccggaaacgctcaaaagcatcttttccggcatgcaccgggattttcccgtatatgatgaaaacgactggtatcggcttttaacgggaaaactgatcatcaatgtatgcatcaacccgttaactgcattgctgcgcgtgaaaaacggagagctgttaagaaatgacgcttacaaaaaatatatgagaaacgtgtttgaagaagcggagacaatacttggcctcgccgatagagaaaaagcgtggaacaaggtttgcgaagtttgcagactgacggaaaaaaatcattcttccatgctcgtcgatatcatggcaggcaggcggaccgaggccgatgcgattatcggctaccttgtaaaagaagcggaaagccgcggattgccggccgttcatctcacgtttttacaccgcagcataaaagcgttagaaagaaattgaaacaaagtcttttgaggttttccggtaacatgctatactcatttcggaaacctaactatttattggagaaaggaagttccagacagatgcagctaactgaactttccatcaaaagtcaaaataagtttgtgcagcactatatagatggagaaaacatgtcttcattttttgattatgatattcattcagaggacgtatggcaaaagcggcttcatgacctctcttcgcggccgtttgccagagaggaattagcggattatttatcctcctatcacgaaaaatttcactccgccgccatgcaggcctccatcgaaaaactgagagatccaaaaagcgcagcggttgtaggcggccagcaggccggtcttttaacggggcctctttacaccatacataaaattatctccattatcgtacttgccagacagcaggaagaggcgctgcagattcctgtcgctccgattttctgggtggcgggtgaagatcacgatctggaagaaattaattatgtgcatacgtcaacagagaataaaggtccggtgaagcggaaactgccgcagtcgtactggaaaaaaacatcggcggctaaaaccgagcttgatcaggaaaaatgcgcggcttggattgatgaagtgttcgctgcttttgaggaaacggatcacacaaacacactccttcaaaacgtgaagcgatgtttacgctcatcagagacattcacggacttttttgagctgttgatcgccgacttgtttcaagaagaaggccttattctgatgaattcgggagatccggggattaaaaagctggaaacgggtatgtttcagcagattttaaaacacaatcacgagcttgtcaaagccgtgtcagaccagcagcgtcttatgcgggaagccggttatcacccgattattgaatcggacaaagatcaggctaatctgttttacgaacacgagggagagcgtttcttaattgaaaaagaaaacggcgtttttgtcattaaggagcttgacctgaagtggacgaacgacgagcttcatacccatatggaagaaaaaccggaatgtttcagcaataacgttgtgacaaggccgcttatgcaggagtttctcatcccgactctggcgtttatcgcgggaccgggggagatcaattattggggtgagctgaagcaggctttctcattaatgggcttccgcatgacgccggtagtgccgagactgaacattacgattcttgagcgccatattgaaaagaagctttcagaacggaatattccgcttcaggaagcgatcgaacacggcaccggacacctgaaagacgcttattttgaagagcagattccggaagagttttcttctgtaatggaacaggcgaagtcgcagattgaagctgtccataaaagcgcaaggaacgaagcgctgaaggtcgattcaagccttgagccgctcttacagaagaatgccgccttcattcaggatcagctcttgtttttagaacggacggtaacgaaaagaattgaagaaaaagaaggttttgtgctgcgtgactatgaaagaatccaaaacagcatcagaccgctcggcgctccgcaggaacggatttggaatgtaatgtattatttgaaccgttatggtccaaaattcttcacaaccttcaaacatctgccattttcttttcaaaaccaacatcagattgtcaaactttgaaataaagttttaaagaaccctgaatagttcagggtttttttttatgtgtaaacagtgtaaaatgaggttgtggagagaagtggcggatagtggtgagtttaggggagaaagtggggtccttatcatgtttatgggtgaataccagcatacaattgatgcaaagggccgcatgatcgtacccgcaaaattcagagaaggcctcggtgagcagtttgtgctgacaagaggacttgaccaatgccttttcggctatccgatgaatgaatggaagctgattgaagaaaagctgaaggctctgccgctcaccaaaaaagacgcccgcgcatttacccgattctttttttccggtgcgaccgaatgcgaactggacaagcagggaagggttaatattgcgtcatctcttctgaattacgcaaaactggaaaaagaatgtgttgtcatcggggtttccaatcgaattgaattgtggagtaaggtaatatgggaacaatacacagaagagcaagaagattcattcgctgaaattgctgaaaacatgattggatttgatatataatggatcttcgtgcatcacaacaacaactgacaattcaattcattcctgataaaggtgggaccgacacaaatgtttcagcataagacagtacttcttcgtgaaaccgtcgacggtttaaatatcaaaccggacggaacctatgtggactgcacccttggcggcgccgggcacagtacatatttattgcagcaattatcggaaaaaggacgcctgatcgcctttgaccaagatgacacggcgcttgaaaacgcacagaaaacattgtccgaatacaaaggacagctcattctggtaaaaagcaactttcgttatttaaaagagtgtttacatgaacacggcattacgagtgtcgacggaattttatttgatttaggagtatcctctccgcagcttgatacaccggaacggggattcagttatcatcatgacgcaccgctggacatgaggatggaccagtcggccgcccttacggcgaaagaagtcgtaaatgaatggcggtatgaggaccttgtgaggattttctttaaatacggagaagaaaaattcagcaagcagatcgcccggaaaattgaagaggcaagagaaaaatcgcctattcaaacaaccggccaactggtcgatctaataaaggacgcgataccggctccggcgagaagaagcggaggtcatccggccaaacgtgtattccaagccattcgaattgccgtaaacgacgagcttcaggtatttgaagaggccctcttgcaagcgatagaggtgctgaagccgggcggaagggtgtctgtgatcacttttcactcgctggaagacagaatgtgcaagacgacattcaaggaaaaatcatcacttcccgaactgcctccgggtcttcccgtgataccggaagaatttgaaccggaattaaaactgattacgagaaagcccattacggcatcaaaagaggagcttgaagaaaataaccgcgcccggtcagcgaagctccgcattgcggagaaacgaaaataacgggcagcaaatgacaacattaaaggaggtcatcagcctatgagcaacttagcttaccagcaggaaaaacaacaacggccagtgataagtcccgaaaaaaaggtgattgtcaaaaagagggcttccattacactcggggaaaaggtgctgctcgtcctgtttgccattgccgttctctccacatcaatgtttatcgtatcaaaggcatacgcggcgtaccaatccaatattgaggtgcaaaaactggaggagaaagtatctgagaagaataagcagatcggtgatctcgaaaagacggctgctgacttaagccagccgcagcgcctgatggatatcgctaaaaagcacggtttgaatctgaaagataaaaaagtgaaaaacatacaggaatgataacccatgccgaaaaaaaataagtttatgaacagaggagcagcgatactcagtatttgtttcgctctctttttctttgtcattctcgggagaatggcgtacattcaattaaccggtaaagcaaacggagtagaacttgcaacaaaagcgaccgagcagcacgaaaaaaagcggacgatagaagcgagccgcggctctattcttgaccggaacggcaaagtgcttgcagaggacacggcgacatataagctcattgccgtgcttgataaaaaaatgacgagtgatccgaagcatcctcagcatgtcaaagacaaagagaaaacggcggaaaaactggcgaccgttatcaatcttgataaaagcgagattctggacatcttaaacaggaatggcgcgaagcaggtggaattcggttcagccggccgcgatatctcttatgcgaaaaaacaaaagatcgaaaaaatggatcttccgggtatttctttcttaagagatacgaagcgctactatccgaacggcatatttttgtcaaatgttctcggctatgccgatgtgaatgaaaaaacaaacgagatacaaggctctttaggacttgaaaaaatactgaataactatctgacggaacgtgacgggtccgtcacttacgaaagtgataaatccggctggaaacttccgaacagcaaagaaaaaatcaccgcacctaaaaacggtgacaatgtatatttaaccattgatcagaaaattcaaacctttctagaagacagcatgacgaaagtagcggaaaaatataaaccgaaaaaaattatggcggctgtcgtagaaccgaaaacaggcaaagtgcttgcgatggggcagcgtccgagttttgacccgaatatcagaaacgtcaccaattattacaacgacttagtgtcgtacgcgtatgaaccgggttcaacgatgaagatctttacgcttgccgcggcgattcaggaaaatgtgttttccgcaaacgagaaatataaatcaggaacatataaagtgggaggcaaacctgttaaagattggaacgatggcgccggatggggtatgacaagcttccatgacggcctcatgaggtcatcgaatgttgctttcgccaaactggccaacgaaaaactggggtttgaccggtttaatgagtacctgcacaaattcgggctctatcaaaaaacagggattgatctgcccggtgaagtatcaagtaaaattaactacaaatatgattttgacaaagcgtctacggcttacggccaagcatcggcgataacaccgatccagcagcttcaggccgtcacggcgattgccaataacggcaaaatgatgaaaccttacgtcattgatcatattgtcgaccccgatacgaaaaaagtcgtcaagcagacaaaaccggagcaagttggcacgccgatttcagccgatacggcgaaaaaagtccggaacctgctcggagaagtcgtgacgtcagacatcggaacgggaaaaccttataaaattgaaggttttgacgtcgcgggtaaaacgggaaccgcacaaatcgccgggacaggcggatatttaaggggaacgagcaactatgtgttttcattcatgggcatggcgccgaaaaatgatcctaagctcgtcatctatgtagccgtgcagcagccgcagttaaaagcgggtcaaagcagctctgatcctgtcgcggaaatctttaacccgacgatgaaaaacagcctccactacatgaatatcgaaccgacggaaaaaacagattccggtcaggaagaaacgaaaagccaaaagatgcctgacctgacagataagacagtcacgggcgctgagaaggaagcgaaaaatgaacatctcacaccgattgtcatcggcagcgatgttgccgtaaaagagcagtatccgacagccggagaagatgtgatcaccaatcagaaaatcttcttaaaaacagacggaaagatgacgatgccggatatgtccggatggtcgagacgggaagtgcttcaattcagcaaagtatcaggcattcacatcgatgtgagcggtgaaggttacgcttcaagccaaagtgtgaaaaaaggcaaagaactgaaagaaaataccgtgatcaaggtgaaatttaaaaatcctgattaacgggacagagaagtccgcggatgcccgcgggcttcttttttatgcgccgccgttctatgtgtccaagctgaggcataaattgaaacaagcctaaataaggagtggacggtcccttgcgcgtttcaaatgtaacggttcgaaaacgtttattactggttttgctttttggcgtaatcatttttttgatcattgacagcagattaggctatgtccaatttgtgatgggagaaaagctgacttcactggctaaggattcctggagccggaatttgccgtttgagcctgagcggggagaaatccttgaccgaaacggcgtgaagctggctacgaataaaagcgcgccgaccgtctttgtcgtaccgcgccagattcaaaatcccataaaaacgggcaagcttctcgcgtcagttttaaatatgtcggaagagaaggtctacaaacacattactaagaaaacctccatagaaaaaatctcacccgaggggcggaaaatttccaataaaaaagcgaaagaaatcaaagcgctcgacttaaaaggggtttatgtggctgaagacagcatccgccattatccgtacggaagctttttgtcccatgttctcggttttgcgggtattgataaccagggccttctcggattggaggcttattatgatgatgacttaaaaggtgtaaagggatcagtgaaattttatacggatgccaaggggaagaaaatgcctgatgaagcggatgattacacccctccgaaagacggacttgatatgaaattgacgattgacgccaaggttcagacgattatagaaagagagctcgataatgcagcggcgaaatataatccggacggaatgattgcggtcgcaatgaatccgaaaaacggggaagtgctcggtatgtcaagccgtcctgattttgatccggctgactatcaatccgtagatccgtccgtttacaaccggaacctgccggtatggagcacatatgaaccgggttcgacctttaagattattacgcttgcggcggctctccaagagcaaaaagtaaacttgcaaagagaccacttttatgacaaaggatttgccgaggttgacggcgcccgcctccgatgctggaaaaagggcggtcacggttcgcaatcttatcttgaagtcgttcaaaattcctgcaaccccgggtttgtacagctgggggaacggctcggaaaacaaaagctgtttcaatatattaaggacttcggctttggaaagaaaacaggcattgatctgcaaggggaaggaacggggattttattcccgcttgacagagtcggcccggtcgaacaggcgacaaccgctttcggacaaggggtttccgtcacgccgattcagcaggtggcagccgtttccgcagcaataaacggcggaacgctttatactccgtttatcgccaaagagtgggttgatcccgttacgaaaaaaacagttaagaaacaatcgccgattgcgaaaaggcaagttatttcccaggaaacgtcaaagcagatcagatatgctttagaaagcgtcgtcgctcagggaacggggcggaatgccttcgtggaaggatatcgcgtcggcggaaaaacaggtaccgcacaaaaggtcaaagacggcaaatatctcgaaaacaaccatatcgtctcctttatcggttttgcgccggctgatgacccgagcctcgtcgtgtatgtcgcggttgataatccgaaaggcacgattcaattcgggggaaccgtcgccgcgccgattgtcggaaatatgatgagagacagtctgccggagctcggcgtgaaaccgcgaaaaaatcaaatcgagaaaaaatatcaatggaacgacacaaaaacaatagaggttccgaatgttgtagggatgtctgtctctgatcttgagtcgctgcttgtcaatttgaatattgactcctcaggaaaaggaagcaaaattgtgaaacaatcacctgcagccggaacgaaagtaaaagaaggctcaaagatccgtgtttacttgagtgaagaatgagtctttttgaggcagccgattgttttcggctgccttttatcataaagagaaaaaaagaagataacttttaagattaactggatgtatccttttatttacgctaaaatatgaactgtatgtttaaaagccattctgacttttataaacggttatcatgataaaagaatgaatagaatttctgagaggtttgatacaatgaaacttacaaagctgcttacatatttaatggccgaacctgttcaaaatgactttcatgaccctgacataacttcaattgagatggactccagggaagtgagaaaagggagtctttttgtgtgtataaaagggtatacggtagacggacatgatttcgcccaaaaagccgcagaaaacggcgcagcggccatcgttgccgagaaagagcttgacgtcgatgttcctgtcattatcgtccgccggtcacagcgggcgctcagcgttctttctgacgcgttttacgggcagccgacaaagcagcttcagcttatcggcatcaccggcacaaacggcaaaacatcaacgacgcacatggttgatgagattttcaaaaaagcgggaagacagaccggtttaatcggaacgatgtacattaaaatcggggatgagacattcccggtcaaaaatacaacgcccgaaagcgtcacactgcaaaaaacgttcaagaaaatgaatgatgagcatgttgacacagctattatggaagtgtcttctcacgctctgtcactcggcagggttcacggctgcgattatgatatcgccgtattcacgaacctgacgcaggaccatttagactatcacaagacgatggaagactacagacaggctaaaagcctcctgttttcccagctgggcggctcctttaaccatgaaaagccgaagcgggccgttttaaacgcagatgacaaagccagtgcttattttgaaaaagtgacggcggcgcacatccttacatacggaatcgagaacgatgccgatgtcatggcgaaacaaatcgagatctctgcgcaaggcacaaattttgaactcgttacgccaaaaggaacaaagcagatcacggtttcactcgtcggccgcttcaacgtgtataacgtactggctgcagcggcgacagcgatcgcagcgggtctgccgtttgatacgatcacgagcgctcttgaagagctgcaaggtgtcagaggccggtttgaactggtgaatcataatcagccgtttcctgtggtcgtcgattacgcgcacacgcctgacagtctggaaaacgttctgaatacatgcaaagacatgacagagggcaagcttttcgtcgtcgtcggctgcggcggagaccgggataaaacgaaacgcccgaaaatggcggaaattgcggtgcggattgccgacgaaccgattttcacttcagataacccgagaagcgaggacccgctggccatattaagagatatggaaagaggggtagaaggcacctactatcacagtatcgcaaaccgcgagcaggctatcttttttgctattgccaacgcgaaaaagggagatgtggttctgattgccgggaaagggcatgaaacctatcagcagatcggcaatgaaacattcgactttgatgacgccgaagtagcgggaagagctattgttgagctgaataaaaagtaaaacaggaaagagtgttagaatgagtgaaatgaaaagaattacggggacacaatgtgaatatgataaatacgtatgtcgtttgaacgaaacgggaggagaaaagagcaatgcttgagcaagtgattttatttacaataataatgggatttttaatcagtgttctgatatctccgattcttatcccgtttttaagacgtttaaaattcggccaaagtatcagggaagaggggccgaaatcacatatgaaaaaatcagggacgccgacgatgggcggggtcatgattatcgtatccatcgctattacggcgattgtcatgacgcagaaattttcgcatctgagcgcggaaatgtttcttctgctgtttgttacgatcggatacggcctgctcggctttctggatgactatattaaagtagtaatgaaacggaatctcggattgacgtcgaagcagaaattgatcggccagatcattattgccattgtattttacggagtatatcattattgccatttttcaaccggcatcagggtgccgggcacacatctgtcaatcgatctcggctggggatactttatcctcgttctctttatgcttgtcggaggttcaaatgccgtcaacctgacagacggtctggacggtctcttgtccggtaccgcggctatcgcattcggcgctttcgccatccttgcgtggaaccagtcacaatatgacgttgcgattttctcggttgccgttgtcggcgccgttctcggttttcttgtattcaacgcccatcccgccaaagtatttatgggggataccggttcgcttgcgctcggaggagcgatcgtgaccgttgccattctgacgaagcttgaaattctgctcgtcattatcggcggagtttttgttattgagaccttatctgttatcttacaagtcatcagctttaaaacgacaggaaaacgaatctttaagatgagtccgcttcaccaccattacgaattggtcggatggtctgaatggagagttgtcgtcacattctggactgcgggactgctgcttgccgttttaggaatttacatcgaggtgtggttataagtggaaaacgaactttttttgcgaaaacaaaactttctggtcctcggactggcgaaaagcggatatgcggctgcgtcgattcttcatgaaaaaggcattaacgtcgtcgtgaatgatcaaaaagcctttgaagagaacgaacctgcccaaaggctttcagaaagaggaatcgaggtcatctgcggtgagcatccgacgtcactttttgatcagcatcacattaccattctgatcaaaaatcccggaatcccgtatgaaaatatcatggtggaggaagcgcaaagaagaggcatcccggtttggacggaaatcgagcttgcgtattatatcaccaatgcaaaattcatcggcattacaggttcaaacgggaaaacaacaacgacgaccctgatttatgaaatgctgaaagctgactcgataaaggcgctgatcgcaggaaatatcggcactgtcgccagtgaagtggcttatcatgctgacggtgatgaatggatcgtcacagagctttcttcgttccagcttatggggactcatgcgttcagacctgaaatcggcctgattttaaatgtgttcgacgctcatttggattaccatcacagccgtgaaaactatgaaaaagccaagcagaacgtgtatcttcatcagcttgagagtgatacggccatcgtgaatcaaagcgatgaaacagtcgtgcggcttgccgaaagcggaaaagccggcaccgttccgttttcagtgcaccaggaactgtcaagcggcgcatttattaaagacggaatgctgatgttcggcgatgaagcgattctgcctgttgatgacatcgtgctgccgggcgcgcacaatttagaaaatatattggccgctgtagccgcggcaaaaacggcgggcgcgtctaataaagcgattcagaaggtgctgacaagctttaccggtgtcaaacaccgtctgcagtatgtaacagcaatccggaatcgtaaattttataatgacagcaaagcgacgaatattttggccacaagcaaagcgctctccgcgttcaaagcaccggttattctgcttgcaggcggactggaccgcggcaacggttttgacgatctgaaaccgtatatggacaatgtcaaagcggtcctgacgttcggacagacagcgccgaagatagaaaaactgggcaatgagctgggaatacaacatgtcaaacgtgtcgataatgttgaacaagcagtatctgcggcgtttgcgctctcaaatgaaggagacgtcatcctcttgtcacccgcgtgtgcaagctgggatcagttcaaaacatttgaagaacgcggtgacatgtttatagatgccgtgcatatgcttaagtaagggcttgtctctgttcatcggcagccctaaatgacttatgcttggggtgtcgattgctttgactactaaaaaaacagcgcctgatttgttattagttatcattacgttattgcttttaacaataggattaattatggtctacagtgcaagtgcggtatgggcggattataaatttgacgactcgtttttcttcgcgaaacggcagctgctgtttgcggggatcggcgtcattgccatgtttttcattatgaatgtggattattggacatggcgcacatggtcgaagctgcttctgatcatttgtttttttctgcttgtgcttgtgctgattccgggagtcggaatggtgcggaacggttcaagaagctggatcggagtgggagcgttcagcattcagccttcggagtttatgaaactcgcgatgattgcgtttctggctaaatttctttctgaaaaacagaagaatattacgtcattcagacgcggattcgttcccgcgctcggaatcgtgttttctgcatttattattattatgtgccagccggacctgggaacggggacggtaatggtgggcacgtgcatcgtgatgatttttgtatccggtgcgcgaatcgctcattttgcgttcctcggactcatcggtttaagcggatttgcggcgcttgttctgtccgctccttatcggattaaacggattacctcttacttaaacccgtgggaggacccgcttggaagcggatttcagatcattcagtcgctctatgccgtaggtccggggggactgttcgggatggggctcggccaaagccggcaaaagtttttttacctgccggagccgcaaaccgatttcatttttgctattttatctgaggaactcggctttatcggcggttcgctcatattgctgctgttcagtattttattgtggcggggcgtcaggattgccctcggcgcgccggatttatacggaagctttgtcgccatcggtattatttctatgatagctattcaagtcatgattaatatcggcgttgtgacggggctgatcccggtaacaggaattacgctgccgtttttaagctacggaggctcatcactgacgctgatgctcgcagcggtcggcgtgcttttaaatgtcagccggtactcgaggtattgatctgtatcttgcctcatcactcatgatctattcgttatctataaaaaaacagacaacatcaataaccctgtcctaaaaaacagggttatcgctatgtgattaagggggacatacgaatgcgtattgcagtaagcggaggcggaaccggaggacatatttatccggccctggcctttattaaagaagttcagcgccggcatccggatgtggaatttttgtatatcggaacagagaacggtctggagaaaaaaattgttgaacgggaaaatatcccgttccgcgccattgaaattacaggtttcaaacgaaaactttcttttgaaaatgtaaaaaccgtcatgcgtttcttaaaaggcgtgaagaaaagcaaatcatatttaaaagagtttaaaccggatgccgttatcggtacaggcggctatgtatgcggtccggtcgtatacgcggcggcaaaaatgggaattccgacgatcattcatgagcaaaacagcctgcccggcatcacaaataagtttctctcgaaatatgttaataaggtggcaatttgctttgaagaagcaaaatcgcattttcctgctgaaaaagttgtgtttacgggaaacccgagagcctctgaagtcgtctcaattaagacaggccgctcattaactgagttcgggctgaaagacaatcaaaaaacggtgctcattttcggcggaagcagaggcgcggctcccattaaccgtgccgtgatagatatgcaggaagaattgaaaacgagaccttaccaagtgctttatattaccggggaagtgcattacgagaaggtaacggctgagctgaaaggcggaaaagccgctgataatatggtgacaaaaccgtttttgcaccaaatgccggagtacttacaatcaattgatgtcattgtggcaagagccggagcgacgacgattgcggagatcaccgctctcggcattccgagcgtgcttattccgagcccgtatgtgacagccaatcaccaggaagtcaatgcgaaggcgctcagccagcatgacgctgcaatcgtactgaaggaaaccgagctcagcggagaaaaactgatcgctgcgctggacaaaatcgtcatgaatgaagaaaccttaaaagacatgagtgagcggacaaaatcactcggtgttccggatgcggcagccagactgtacagtatcatggaagacataaaaaaatagagcaaatggaatgcggaggtttatgatggagaacgtaattcaggaattaagagaccgcgaagtcggcaaagtgctggaacaagaaccgctcgcgaaccatacaacgatgaaaatcggcggcccggcggacattttgatcatccccaacagtgtggaagcggtcaaagatattatggatattgtgaagaaacatgatctgccatggacggttatcggccggggttcaaatctgctcgtgcttgatgaaggcataagaggagttgtcatcaaactgggcgcgggtctggatcatttggagattgacggtgatcaggtgacggtcggaggcggctattcggtcgtccggcttgcgacttccatgagtaaaaaaggaatgtccggtctcgaatttgcagcgggcatccccggatcaatcggcggggccgtctatatgaatgccggggcgcacggatctgatatgagtgaaattcttgtgaaagcgcgtatcttatttgaagacggcacaatcgaatggctgacaaacgaagagatggatttcagctacagaacgtctgttttgcagaaaaaacgccccggcgtctgtctcgaggcagttcttcagcttgagcaaaaggaacgggaagccattacggcgcaaatgcagcagaacaaagattacagaaaaaatacgcagccgtattcaagcccatgcgccggaagcatattcagaaatccgctgccgaatcatgccggaaacctcgttgaaaaagcgggattaaaaggacatcagatcggcggagcgaaagtatccgaaatgcacgggaattttatcgtcaatgccggcggagcgactgccaaggacgttctcgacctgattgagtatgtgaaaaagacaatccgtgagcagtatgatgttgacatgcatacggaagttgaaatcatcggagggaatcgttaaaaggttctctgatttccatgagctcatgtgatatacttttaacaaatgtcaaacggcatcacagcatgccgtttgtttttcaatcagacgaatgtcaagctgtttcattcttagtgaggtggacaggcagtgaacccaaatcatgaaagagaaaaaatcgtaaatattgaagagcggattccgaaaatcaaagagcagcggaaacaaaaagcaaaccgccggctgatttcattcattgtgctcttttttatgatggtgctgatcatcgtgtacttgcagatgccgatcagcaaagtgtcttctgtcaccgtttccgggaacgaaaacgtgtctgtaaaagagatcaacgcgctttctgatatacataacggacaaaccgagttctggagtctgaacaagaaaaaaacagaagaaaagattgagcagaataaactggtgaaaaaggcggatctttcaaaagtatttcctaataaagtcagcattcacattgaagaatacaagacgatcgcgtatctgcagcggaatgatgtgtattatgaagtgctggagaacggcaccgtgctgccgaacgaagtcacgccggatgacgcgggcccgattttggttgactggacaaacgcgaaaaagcgggtcaaaatggcggagcagcttgataagctttccggttcgctaaagcagtcgatttctgaaatctattatacaccggtaaaaatggaccaggaccggatcaagctgtatatgaacgacgggtatgtagttaccgcttctattaaaacatttgccgaccggatgaagacctatccttctatcgtttcccagctggacggcgggaaaaaggggattatccacttagaagtcgctacgtattttgaagaatttaacaaaggtaaatccggcaagaaaaaagaaaatgattaatagttctaaagaactaattttaaggtgattcaaaagaatctattacaatcagcggggcagccgatataaccgatagcggaataattatgactatgtttgtttttgcccgggatatggctgccggacaaggggaaaattctcaatgcaatgggcgtgtcttcttcaatgaacattgcatttggaattttcctcctgtttcttcttttttcggatgtttctggcaatatctatagcttttctggaggttcatcttagtgtagactaatggaaagcgggtatatttgcatctggtttgcacattatggcaccgtgacaggaaatcttacggtaaggtgggccgtctctaaaaaaaataaaaaaaatgcgatataaaagaggatatacatagaatataacgaatagtttcattaaacataaattgtgagaaatcagataagaatttgttgatgctgttgtttttgttacacacttgtaaagccacattcattgtattgttgttccgcaaataatagaatagaatttgatcgaaatgtgaggaggtgccatagaatgaacaacaatgaactttacgtcagtcttgacatcggtacgtccaatacaaaagtgatcgtcggagaaatgacagatgattcccttaacattatcggagtgggaaatgtaccgtctgaagggttgaaaaaaggctcaatcgttgatatagatgaaaccgttcattctataagaaaagcgtttgaccaagctgaaagaatggtaggttttccgctgaaaaaagccattgtcggcgttaatggaaattatattcatattcaagatacgaacggcgttgtcgctgtttccagtgaaaacaaagaaattcacgttgaagacgtccgcagggtaatggaagcggcacaggttgtgtcggttccgcatgagcagctgatcgttgacgtcgttccgaaacagtttatcgttgacggaagagacgaaattaccgatccgaaaaaaatgctcggagtgcgcctggaagtagaaggcacgctgattaccggctccaaaacgatcttacataatttacttcgctgtgtggagagagcgggcgttgaaattactgatatctgcctgcagccgcttgcggccggttcggcggctttgtcaaaagacgaaaaaaacctcggagtcgccatgattgatatcggcggcggctcgacgacggtggcggtatttgaacaggggcacctgaaggagacagccgtcattccgctcggaggcgaaaacatcacgaaagatgtatcgatcggattgcgcacttccaccgaagaggctgaaagagtaaaaaaacaattcggacatgcattctacgatgaggcttcagaagatgaagtatttgaagtcaccgtcataggaacgaatcaaaagcaatcttttacacagcaggaaattgccaatattattgaagcaagagtggaagagattcttgagattgccgcagccgaaattgagcatatgggaattacagatctgcccggcggctttgtgctgaccggcggacaggccgcaatgcccggagtgctttcattggcacaggaagtgctgaggcacaatgtaagggtcgcaagcccgaattatatcggtgtaagagaccctcagtatatgacgggtgtcggcttgatacaatttgcctgccgaaatgccagaattcagggaagaaaaataggctttcatatgccggaagaagccgtgcaggaaatcgcggtctctcacgaagaagaacatcatcagcggccagaggcgcagcagcgtccaaaagcaaaacaaaaaacacaagccgaacacaacaaaccgagcaaaatgaaaaaactattaagcatgttttgggaatagattgatagtcattcggcagattaggaggatttagcatgttggatttcgaaacaaacatagacggcttagcatcaattaaagtaatcggagtaggaggcggcggtaataacgcggtcaaccgaatgattgaaaatgaagtgcagggtgtagagtacattgcggtaaacacggacgcgcaagctcttaacctgtcaaaagcggaagtgaaaatgcagatcggggaaaagctgacccgcggtctcggagcgggagcgaatcccgaagtcggcaaaaaagccgctgaagaaagtaaggaacaaatcgaagaagcgttaaaaggcgctgacatggtgttcgttacagccggaatgggaggcggtaccggaacgggagccgcaccggtgatcgcgcaaatcgcaaaggacttaggcgctttgactgtcggtgtcgtaacaagaccgtttacatttgaaggaagaaaacgccagctgcaggctgcaggcggtatcacggcaatgaaagaagccgttgacacactgatcgttattccgaatgaccgcattcttgaaattgtcgataaaaacacaccgatgcttgaagcattccgtgaagctgataacgtgcttcgccaaggggtgcaaggtatctctgacctcatcgcaacgcctggtttaatcaacttggactttgccgatgtcaaaaccatcatgtccaacaaaggttcagcattgatgggtatcgggatcgctacaggagaaagccgtgctgctgaagccgccaaaaaggcgatctccagtccgttactggaagcggcaatcgacggagcgcaaggtgttttgatgaacattacgggaggtacaaacctgagcctctacgaagtgcaggaagcagccgacatcgtcgcttctgcatctgaccctgatgtcaatatgattttcggttcagttatcaatgaaaatctaaaagatgaaatcgtcgtcaccgttattgcgaccggttttatcgaacaggaaaaagatgactcaaaaccgcagcgtccgactttaaaccaaggattgaagtctcaaagccaaaatgctgcgaaacgtgagccgaaacgagaagaaacacagcatcaaaacacggtgaaccgccatacatcacaaccggcggatgatgccctcgacattcctacatttttaagaaaccgcaacaaacgcggctgatgtaaaaaaggacaagaccacatggttttgtcctttttcttttttgtgcacagtcttccttcctatcccccatgatctatacagtgaaaaaagaagctttatacctatgacgaattgattgtttttaagtttcatacggctttctacagaatgtgacaatatctggatggaagattgtctacatttaacgtacagcatcgaaatgacaaacgattccaattatgaaggagggatacacattttatagggcgttaccaaataagggggatacgattgaagaaaaaaacgagaaacagatggacaggctccgttttaagcgcgattgtcgtcagttcactgttgtttccgggggcagtcggagcgaacagcacaccgggggcagtttcttttaccaaagatctttcttcctctaagagcattcagcataagatttccgattcagtcaagaagcgttttgaaaaaaatgataaagtcacgtttcttatcaaatttaaagagaaagccaatacgaaaaaagcggtcaaagaagcagaaaaaaatgccgagtctcattcgctttccgcagcaaaaaccgaatatcaaaagcggtcagccgttgtttcttctttaaaactggcagctcatgatgcgcagcagaatctgaaaacatatttggaaaaacaaaaaaagaaaggaaaggctgatcacatccattcctattatattgtcaacggaatggcagttactgcttcgaaagaggtaatggaaaaagccgcctcatttcctgaagtagaaaaagttcttccgaatgaaaaacgtcagcttactcaacggcaatcaaaagctccttttcaaatgaagaaaaaacaaaaagaggtcaaagcaaaggaaggcatcgaatggaatatcagccaaattgatgcgccgcaggcctgggcctcaggatacgacggaaccggcacggttgtcgcctccattgatacgggagttcagtgggatcatcccgcgcttaaggaaaaataccggggttacgatcctgaaaatccagcagcgccgaatcatgaaatgaactggtatgatgccgtgtcccataaagacgctccctacgacgatcttgaacacggcactcatgtaacagggaccatgacgggttcagaacctgacggctcaaatcaaatcggtgtggctccgggggcgaaatggatcgcagtaaaagcattttcagatgacggaggaaccgatgccgatattttggatgccggtgaatgggtgcttgcgcctaaagataaaaacggcacgccgcatcccgagatggcgccggatgttgtcaataattcctgggcgggcggttcgggaatggacgagtggtaccgcgatatggtgaatgcgtggagagcggcagggatttttccggaattctctgcgggaaatgaagacttatttacaccgggaggaccgggttcaatcgcaaatccggccaattatcctgaagcatttgcgacaggtgcgactgacatcgacaagaaactcgctgatttctcacttcaaggcccctcaccgtatcatgaaacaaaaccggacatttcggctccgggcgtgaatatccgttcttctattcctggaggaacatacgaaggcggctgggacggaacttcaatggccgggccgcatgtggcggcgacggcggctttgttaaggcaggcgaacgcctctattacggtcgatgaaatggaagacgttctgacgcgcaccgccgaaaagctgacagattccgtttttccggaatcaccgaataacggttacggccacggcctcgttaacgcttttgatgccgtttctgccgtaacggacggaatcggaagcgtagaaggcaaggtatcttctgcgggtgaagatcacaatccgcccagctttcatcatgaaccggtctcagaggcttacaaaggggcaaaccttccgttaacggttacagcagaagatgatgtaagcataactgaggtgatcctctcctatcagtttgatgaaggagagtggaaaacgacagccgccgttcaaaaaagcggtgatgaaaaaaagggaacataccaggcggagattccggacataacgggaagcaagataagttataaatggaccataaaagatttcggaggtcattctgtagaatctgatacgtaccgggctgacgtgaaaccgagcattacggcgggatacaaagaggattttgaatcacagccggcgggctggtccagttacgggacacatgatcaatgggaatggggtatcccgggttcagggcccggcgccgcattttccggagataaagtgtatgcgacgaatctgtccggcccttatgccgattcggccaacatgaatctcgtgatgcctccgattcaagttccggaaacagggcggctgtttttacaatttaaaagctggcacaagctcgaagaattttttgattacgggtatgtgttcgttctgccggaagggaaatcaaattgggagcaggcggccgtttacaatggtgattccgcaggatggaatgatgaagaggcggatttatctgcgtataaaggccaaaacataaagctcatgtttaatatgcagtctgacgaagtactcaatgaagacggatggtatatcgatgatatccggctttcaagcagccctctcggcaaggcggctaaaaaaagtaaacacaatagacaaacacctcccggccacctgaagaaaaaagccatcagtccgaaacaggccaaaccggcagtgaaatcacccggaaaaagagtgaaacgtgaaacaaacctcctgccgctcagagcgcaaatcagtgtcgccgagacggggaaatccgtatattccgaccctgcaagcggaagttacagcctgtcacataaggcgggaagctatacgctgaaagccgaggcttacggatttaagtccgcttcgaaacaagtttctattcaatcagacaaaaccgcacaggcagactttacactggagcaaatgccgtccggcacgctaaaaggaaccatcaccaatcagtccacaggcgaaccggtaaaaggggctgcgctttatgtggccgaggatgccgcaattgagccggcggtgacaaacgataaaggggaatattcgcttaaggcgtatgaaggctcctacacaatcaaagtagcggcaaaaggcttttacaatagcgaattttctgtcgacatcaaaggagatgctgaaaaaaacgtcaagcttaagccgtatgtcggttatgaaggggaaatcgcctatgataacgggacggaagaagccgcgctgtcatattttaaagccggcagcaaatctgccgttaagatgaccctcaaagacggaaaagaacacggtatgctgacgggaggcctttttaaattttggggcgccgactggcctgatccgggcggtaccgaatttcaagcagaagtatatgatgcatccggccctgatggagctccgggcagcaaaattgccggcccgttccaagctgaagcgcttcgaaacggcgagtggaccaaagtggatctcagctcaaaaggaatcgcggtcggaaaggatttttatcttgtgttccgtcagacgaaacccgatccttatacacctgccctgtcatctgatgacggcagcccgtactcgaacagaaactggcaatacctcgacggccgctggtcaaaagccgataaaacagacggaaactttatgatcagggctttggtcgactacgaagcttctgtgcctgagataacgtcgcctgaaaaccggtcatttacaaacaagaagtcaatcacggtgaaaggaacggcttcaccaaaaaccgctgtccgtcttaccaataacggtaaaaccgccgcagaaacgaaagcagatgcagacggcagtttccaggccggtgtcacactcactaaagatggcaatcggctgacagcggcatctgtgacagacagcgggtcaaccgacgagtcacgccctgtcacggtcatactggatgaggataagcctgatgtgacgattgacagtccggcaaacggtgataaaacaaataaagaagcagtgactgtaaaaggaaaagtgcacgacgcccatttaaaatgggtaaaggtgaacggaaaaaaagctgaagtaaataacggttcttatcaagcgagaacccttctggaaaacggcagcaatgagatcaaggtcacggcctcagatgaagctggtaacaaaacaacgaaaaagacggtaatcgatgtcaattacaatgctcccgtcatttccggattggttcccggagcggataaggaattaaaagccggagaatcagtgaaaatcgctttttcaagcggaaagaaattagacgcttccttcgtgatccgtctgcctctgacaaacgcccgggcagggagccaaaacgcaacagagcttccgctgagagaaatttctccgggacgatatgagggttactggacggcggcttcttccatcaaagcaagcggagcaaaaattgacgttatcgcaagagatgactacggaaatgaaacgagacagacggctaaaggaaaactttatatcaatgagtaaaaacagagcgctgccaaatcacggcagcgcttttttagttgaaggggacaatagaaaatcaaccttttcggccctcgacaaataaaacggttatcccttaaaaattgtactttaccctcaacattaattgacagactttcccacagagcttgctttatacttatgaaacaagagagagaaacagatatgtaagacaaaagaggaaaggggtcagatgtgaaaatctatctggatgtcatttggctgttgaacttttgttttgattctcttttgcttttattgaccgcctttattttaaaacgccaggtgaaaaaaagaagagtggccgccggcggtttcatcgggtcagccattgtgcttctgatgtttacgcctatttctccctttgtggagcatccggcgggaaaaatggcgttttcggtagtcatcgtgcttacggcttttggctttaaacggttccgatacttttttcaaaatttgttcgccttttatttcgcgacttttctcgtcggcgggggaatgatcggcgtacattccctgctgcagacagaatcaattgtgcagcaaggcgtaatggttacaagccagaccggattcggcgacccgatcagctggatgtttgtagttatcggatttccggccatatggtttttttcgaaaaagagaattgaagacatcgagacgaagtccattcagtacgatgaacttgtcatggtgcaggcggaattcagcggacagacaatccgcgcgaaaggattggtggattccgggaatcagctgtatgatccgctgacgaaaacgccggtcatgatccttcacattaacaaattcgctccgatcctcagcgaaaaggaaacggacttcatcaaatccgccagtccgcttgaagtgatagagcagcttgatgattcgttccgccatgcggataagctgaggctgattccatacaggggcgtcggccaggacaatcaatttttactctgtttaaagccggattacgtcacgattttaacaaaagacgagatgatcgcatgtgaaaaatgcctgatcggcatcagcacgaagccattatccgctgacggtgaatttgacggaatcgttcatccgaagatgctgacagggaaggctgtaaaacatgtttcctgacgaaaagtctgttattcatcatactcaaaacgcgtggtatttagaagggggaggaagatgaaaaaacttaagctgcgtctgacatatttgtggtataaatggctgatgaaactcggactgaaaagcgatgaagtgtattacataggaggaagcgaggcgctgccgccgcctttgtctaaagaagaggagcaggtgctcttattaaagctgccgagcggggatcaggcggcgcgggccatcctgattgagagaaacttacgtcttgtcgtttacattgcccgcaaattcgaaaacaccggcatcaatatcgaggacttaatcagcatcggcaccatcggtttgatcaaagcggtaaacacgtttaatccggaaaagaaaatcaaactcgccacctacgcatcgcgatgtattgaaaacgaaattttaatgtacttgcgccgaaacaataaaatccgttcagaggtgtcctttgatgaaccgctgaacattgattgggacggaaacgaactgctgctttcggatgtgctcggcacagatgatgatattattacgaaagacattgaagccaatgtggataaaaaacttttgaaaaaagcgcttgagcaattaaacgaaagagaaaagcagattatggaactgcgtttcgggcttgtcggagaagaagaaaaaacccaaaaagatgtagccgacatgatggggatttcacaatcttatatctcccggctcgaaaagcggattatcaaaagactgagaaaagagtttaacaaaatggtgtaaaattttttccatctgacagcccttactgctgcaaggattgccgccgccggatgtttatttctgtaaaatagcggtgcatatttttcccacccgaggagatacttaacgttgtacagcagctcctagtgggagggaaaaacgtgtcaagaaataaagtcgaaatttgcggggtggatacctccaaattaccggtgctcaagaatgaagagatgagaaagctgtttaggcaattgcaggatgagggcgatgattcagcgagggaaaagcttgtaaacggcaatctgcgccttgtcttaagcgtcattcagaggtttaacaacagaggagagtatgttgatgacttatttcaggtcggctgcatcggactaatgaaatccattgataattttgacctaagccataatgttaagttttcaacatacgctgtaccgatgatcatcggagaaatccgcagatatttgcgggataacaatccgatccgcgtctcgaggtcgcttcgcgatatcgcatataaagcgcttcaagtaagagagcggttaatcagtgagacaagcagggagccgacagcagaggaaatcgccaaagttcttgaagtgccccatgaagaaattgtgtttgcccttgacgccatccaggatccggtttcactgtttgagccgatttataatgacggcggcgatccgatctacgtgatggaccagatcagcgatgagcgcaacaaggatacacaatggattgaggagctggctctgaaagaaggcatgagaagactgaacgaacgggaaaaaatgattttgcgaaagcgctttttccaagggaaaacccaaatggaggtcgctgaagaaatcgggatatcccaagctcaggtctcaaggcttgaaaaggcagccattaaacaaatgaataagaatatccatcaataacggaaaaagcctttaaaccttgtttaaaggcttttttcatgcgatggtttacgtttgcaaaaaagtgatgtattctaatgtgtaaaagtttttagaaaatttaaataaagtaaacgggggaaacggcaatgattttacagctggacagtgtgtcattaaaaagaaacgggaaatggattttgaaagatattaactggcgcgtcgagaaaaacgaaaattgggtgctgtacggattaaacggagccggaaaaacggctttgctgaatatgttatgctcttattacttccccacttcaggagagatgcaggtgctcggccatcagttcggcaaaacagagctcggtgacaggctcagaaggaaaatcggccttgtttcggcaggtcttcagcacaaattatatgccgcggactccgcttttgaaatcgccctcagcggcgcgtacgcctcaatcgggctgtacgaaactccgagtgagcaggtaagggaaaaagcgatcggtcttctgaaggatttgggcgccatcagttacgccgacaggcggtatgaaacattatcacaaggggaaagacaaagagcgctgattgcgcgggcgcttatggctgatcccaaactgctgattttggacgagcccgtgacgggtcttgattttatggcaagggagcagctgctggacacgattacgtcgatcgccgaaaaagaaaatgcgccgtccatcctttatgtcacccatcacgctgaagaaattctgccggtatttgataaggcgctgcttttaaaacaaggcgaggtgttcgcctccgggaaaatcagggatatgctttctgacgagcggcttacagcgtttttcgatacgcctgtcaatgtcttatggaacaatggccgcccgtttttaacacgtgcaaaagaggcatcaaccgtaaaataacatcaattcaccctgggggtgctgccatgcggctgagagagacgttgtctcaacccttaacggacctgatccggatcatgccggcggagggaagcggtgaaaaaagcggaggaagatccgttttttacccgtttcattttaatgaaacgggttttttgatacagctaaaggggagatttccaatgcatcagattgatatgctgttacaacaggcggagaaacggaggcacgacttcatacatattgctgaaaggttgatcgcctttcccactccggccccgccagcaagaaatacggcagaagcccaaaagtgggtggccggctttttaaaagaaacgggctgctcggtcgatatgtgggatgtgtatccggaagatccgaatgtagtcggtgttttaaaagggacagattcaagcaggcatcaaagcctgattttaaacggacacattgatgtggcagaagccgggggcgaagattggaactctgacccgtttcagccgctcgtaaaagacggcatgctgatcggaaggggcgccgctgatatgaaaggggggttggcgtgtgttcttttctctctgaagctgatccatgatgccgcaattaagcttccgggcgacctcattgtacagtctgtaatcggagaagaagtcggcgaggcggggacgctggaatgctgcaaacgcggctatcacgcggattttgcggttgtcgcggatacgagcagcctgcatattcaagggcagggcggtgtcatcaccggctggatagaattgaaaagcaaacaaacatttcatgacggcatgaggcgcaatatgattcatgcgggcggaggcacattcggagcgagcgccatcgaaaaaatggcgaaaatcatcactgccttgggagagctggagcgccactgggcggtaacgaaaagctatcccggcattgcgcccggcaccaatacgatcaaccccgccgtcattgaaggcggaagacacgcagcgtttgtcgccgatgaatgccggttatggatcaccgtccacttttatccgaacgaaacgcacgaacaagcagccgcagaaatcgaagactatattaatcgtgtcgctgacagtgatctgtggctcaaagaaaacaggccggtgttcaaatggggcggatcttcgatgattgaagacagaggagaggtgttcccggcgctggaaatcgatccggatcatccggcagtttctgtcttggctgcatcacactctgccgtcataaaacaggagcccgtcattgatgtttcccaaaccgtaacagacggaggatggctttatcaggccgggattccgagcgtcatatacggccccggcgatttaaaaaacgcccactccgtaaacgaggaagtgtccgttgatgagcttatggactatacgaaaatcatgctgagatttattctcggctggtgcagccgcaaaaaagattgcccgatgtgacaaggttcagcccggccgttcatataataggaaaaagaacgggcaaagggcgtgatacggatgatcagcatatctgaatttcaaataaaagatgtggtaaacgtgtcgaacggaaaaaaactcggaagcatcggggatattgatattaacgtgacaacgggaaaaattcaggcgattattttaggcggcagcggaaaagttctcggttttttcggaaaagaagaggaaatgatcattccttggcgaaatatagttaaaattggggaagatgtcatcttagtgcgtgtaaatgaaccaaaggggggagcgtaatcctccctttacttgtaaaaagccggaaatctcaatgtttccggcacatttatttatctcatttttcaatcagccgctaaacgtatgcttaaaattgtgttaaaatgagtgggaaattacgcttttttaatgtttgtcgaaaggttggatctccatgaatacatatcacccgtttagtcttaccaccccctcggcactcatgatagaagactggaactgtgtgaatcagcttaacacaaaggtcatcgccggattcacaacgaaaaacggcggtgtcagcaatcctccgtatgagtcattaaataccgggttgcacgtccgggacgaagctcatgatgttgtgacaaaccgtgaagtcatagcgtccttatgcggtactgatctggattcctgggtgttcgccgaccagacacatgaaaaccgcgtccggcgcgtgacagccggggataaaggaaaaggagcgagagactattcttccgcattccgcgggacggacgggctctacacgaaagatgcgaatctttttttggccctttgttttgcggactgtgtgcccttgtatttttatgacccggtgaaatccattatcggcgctgcccatgccggatggaaggggacggtcaaacaaatcggacgcatcatgacggaacgctgggtaaacgaagaaggctcccgtttaacagatattcaggctgtcatcggttcgtccatcagcgcgggaagctatacagtcgacgaccgcgtcatcaatgaagtgcgggcgctgccctttacggctgaatccgccatatgcgaaacggaaaaaggccagtatcagcttgatttaaaagaggtcaaccgtcttcttctgatacattgcggcattccggaagaaaacatttcagtcagcggattatgcaccgaacgagagcatgaactattcttttcacaccgccgcgacaaagggaaaacgggacgcatgatgtcctttatcggaatgaaggaggcattagatcttgcgtgttgctgatcaattacgacatataaacgaaagaataaacgaagcatgtaacagatcgggccgaagccccgaagatgttaccgtcatcgcggttacaaaatacgtatcagctgaaagggctcaagaggccgttgatgccggtattacaagtctgggagaaaaccgggatgccgagcttatccataagcaggaagtcatcaaaggaagcccgaagtggcactttatcggcagtcttcagtccagaaaggtgaaggccgtcgttgaccgtgtatcttatattcattccttagacagactgtcattggcaaaagagattgaaaaacgggcgcagcatacggttcgctgttttgtgcaggtgaatacttcgcttgagccgtctaagcacggtttgaaaacagaggaggtcatcccctttatcagagagctttctgagtttagaaacatttctgtagagggcctgatgacgatggctcccctgacagacgatacagaaacgatcagagcctgcttccggcaattgcgtgatctgagggatcaggtgcaaaaactgaatcagacaaacgcgccgtgccgggaactgtcaatgggcatgtcaaatgattatgaaatcgctgttgaagagggcgcaacttttatcagaatcggctcttcattagtcggaaatgaaccggggggtgtaaacaaatgagcatgaaaaataaactgaaaaactttttctcaatggatgaggaggagtacgagtacgaatacattgaaacggagcaggatcatcaggaagagcatgaacagcagaaagataaacagcctgcttacgctcagaagccgcagggcaagcagaacgtagtaagcttgcaaagtgttcagaaatcctctaaagtggtcttgagtgaaccgcgtgtatatgcggaagcgcaggaaatcgccgatcatttaaagaacaggcgggcggttgtcgtcaatctgcagcgcatccagcatgatcaggcgaaaagaatcgtcgactttttaagcggtaccgtctacgccatcggcggcgacattcagagaatcggttcagatatttttctgtgcacgcctgataatgtcgacgtttccggcacgatttcggagcttataaatgaagacgaacatcagaggtggtaaagcaggatgattctttatcaaattttttccgttctgagttatttaatttacatctactcgtttgccctgatcatctatatctttatgtcatgggtgccgagtacgagagaaacggcggtcggacggtttctcgcagcgatttgcgaaccgtatttagagccgttcagaaggatcattccgcccattgccatgctggatatatccccgattgtagcgattatcgtgcttcggtttgccacgacgggactttggggcctataccgcatgatcgcaatgtatacttgaatgcgacagtttgatacgggcttggcaccagccaagcctctttacatagaaaggaaagaacatgagcgatatttaccagcacttcagacaagacgagcggccttttattgatcaggtgcttgaatggaaacagattgtcctggaccagtatcggatgaagctgactgatttcttagatcccagggaacaggtgattgtaaaagccgttatcggcgacgcctgcggtcttgcgtttttcggaggatatgacagagctgagcgcaaacgcgcgattttataccctgaatatatggaacctgaacaggatgattttgagctccgggcttttgacgttcaatacgctgaaaaattcgtcagcattgaccaccgctctcttctcggatcattaatggggatcggcttaaagcggcagaaatacggcgatctgattttctcagaggaagccgtgcagctcatcgtctccggtgaaatcgccgattttgtcagcactcagctgaccaaggcgggcaaagcgccggtaaagcttgagaaaatcgagctttccgctcttcacattcccgcttcagatgtcgaaataagggatgacacggtttcttcattgcgtctcgacgccgtctgcgcttcaatgagcaggcaatcccggcagaaagcgcaggcgcttgtgaaaaacgggctcgttaaggtgaattggaaagctattgaagatccgtcttatcaggttgctgaaggggacatgctctcgattcgcggcttcggacgatgcagtttggcaaaagttgacggaaaaacgaaaaaagacaaatggaaagttacatttgaacggcaaaaatgagtcgttttttcagtttttttctccatctgtgccgtatttgttttataatgtgaactagataaccgtactgaaatgtaaaaatggaggtggcaatatgccattaacgccgaatgatatccataacaaaacgtttacaaaaggttttcgcggatatgatgaagatgaagtaaatgaatttttaatgcaggtcagaaaagattacgaaatcgcactccgtaaaaaaacggagcttgaggcgaaagtgaacgagctggacgaaaaaatcggccactttgccaatatcgaagaaacgctgaataaatcaattctcgtagcccaggaagccgcagaagacgtaaagcgcaactcgcagaaagaagcgaagctgatcgtccgtgaagcagaaaaaaatgccgatcgcatcatcaatgagtcgctttccaaatcaagaaaaatcgcaatggaaatcgaagagctgaaaaaacagtctaaagtcttcagaacacgtttccaaatgctgattgaagcgcagctcgacctgctgaagaacgatgattgggatcatctgctggaatacgaagtcgacgcggtatttgaggaaaaagaataattttctgattttcttgacattcttcggcccgttcgaatataatacgttcataaattcagatgaaaagacgattgaaagggaccggcatgactcaaaacaggctataaagcgaaccggggaaggtgaaagcccgggatggccggaatcatgcagatcagccctttagtttcctttctgaaccgagagtaggaaaggacgttccatcacgttacgatgttcgagaggaaaagacggatgatccgttttttctaaaagggtggtaccgcgagataagctttctcgtcccttatgggatgagagggctttttttattttctgaaaaatgttgtggaggaatgaaaatggattacaaagatacgctgttaatgccgaaaacagattttccgatgcggggaaatctgccgaatcgtgagccggacatgcaaaaagactgggaggagcaggacatttaccgtcttgttcaagaacggacgaaagaccgcccgaaattcgtgctgcatgacggacctccttatgcaaacggagacatccacatgggccatgccctgaacaaaatcctgaaagacttcatcgtccgctataaatcaatgagcggctacaacgcaccgtacgtgccgggctgggatacgcacggactgccgattgaaacggcgctgacgaaaaacaaaaaagtaaaccggaaagaaatgtccgtcgctgatttccgcaagctttgcgaagattatgcatggcagcagatcgaaagacagcgcgaacaattcaagcgtctcggcgtcagaggcgattgggaaaacccgtatgttacgcttcagcctgaatttgaagcgcagcagatccgcgttttcggcgagatggcgaaaagaggctatatttataaaggtctgaagccggtcaactggtcgccttcaagtgaatctgccttagcagaagcggaaattgaatatcaggacaaacgttccgcgtctatttatgttgcgtttaaagtgaaagacggtaaaggcgttctggaaaacggagaaagcttcatcatctggacgacgacgccgtggacgatgcctgccaacctcggaatttccgttcatcctgatcttgaatacaatgtcatcaaggttggagacaagcgttatgtagtggcggctgaactgatcgaaaacgtagcggaggcatgcggctttgaaaatcctgaagttgtcgcatcatataaaggcagagaattagaatacatcactgcagaacatccgctgtacggcagagattcactcgtcatgctcggtgaccacgtcacaaccgatgccggaacaggctgtgttcatactgccccgggccacggggaagatgactttatcgtcggccaaaagtacggcttagaagtactgtgccctgttgatgaaaaaggaaacatgaccgacgaagcgccgggctttgaaggaatgttttacgataaagccaataaaccgatcacggagaagcttgaagaaaacggcgcgcttttgaaactcgagtttattacacactcctatccgcatgactggagaacgaaaaaaccgacgatcttcagagcgactgcgcaatggtttgcgtcaattaaagatttcagatccgatctgcttgatgccatcaaacaaacgaagtgggtgccggagtggggcgaacagcgcctttacaacatggtgcgcgaccgcggtgactggtgtatctcaagacagcgcgtctggggtgttccgatcccggtattttatgcagaaaacggtgagccgatcatcactgacgaaacgattgaacacgtgtctgagctgttcaaacagcacggctcaaacgtatggtttgaaagagaggcaaaagacctcctgccggaaggatttacacatccgggaagcccgaacggaatcttcacgaaagagcaagacattatggatgtatggtttgattcaggttcttcccatcaggccgttcttgaagaacgagatgatcttgtccgtccggctgatttataccttgaaggctctgaccaataccgcggctggtttaactcatctctttccaccgctgttgcagtcaccggcaaagcgccgtataaaggcgtattaagccacggatttacacttgatgcaaacggccgtaaaatgagtaaatcactcggcaatacgattgacccgacaaaaatcgcaaaacagcttggagctgaaattctgcgtttatgggtatcttccgtaaactatcaggccgatcacccggtttctgaagatattctgaagcaggtcgcggaagtataccggaaagtccgcaacacgttccgcttccttcacggcaacctgttcgattttgatccaagcatcaatgccgtggatgtaaaagatctccgcgaagtggatcaatatatgctgatcaagctgaataagctgatcgataaggtgaaaaaagcgtacgatgaatacgaatttgcggttgtttatcacagcattcacaatttctgtacgatcgagctcagctccttctatcttgattttgcaaaagatgttgtgtacatcgagcatgcggatcatccggaccgccgcagcatgcagaccgtcttttatgaaacgctgctggcgttagtgaaactgacggcgccgattctcccgcatacggcggatgaaatgtggtctcacttatcatttgttgaagaagcgagcgtgcagctgacagatatgccggaaaccattgctgttccggacagtcaggcgacagaagaaaaattcgaccgcttcatggagcttcgaaacgacgtgctgaaagctttggaaacagcccgtaacgaaaaaattatcggaagatcattggaagcgagccttactttgtatccgaacaaagaaaaccgcgacctcttgtcatccattaaagaaaacatcgcgcagctgtttatcgtctcagaactgacagtaaaagacgaaagtgaagcgccggaaaacgcgcaaagctttacaacaggaaaaatgaccgtagaaaaagcggaaggccagatgtgtgagcgttcccgcgtaatttctaaagatgtcggagccaatccgaaatatccgacattatcactgcgcaatgcggaaatcgttgaaaaatattatcaaaaataataaatgagaaagcgcccggtgtcagccgggcgcttttttacatgccagcaatgtcatcgattagaacggcaggaaaattcttatgggcttcaaatagcgctctgagggcaacaataaagctataacatcaagagcaggagttgtgatgaatgaatgatcaactgaccgcaatccacacggagcttctcatgatgaaagaagaacttcaatcaagattattcgaatattcttgctttcaaatgtcagcatctgttgaaccttcaatgaacgaccaagaagcaactctgatctatcatataaaagaagaacttcaggatgttcttcttgccctgtctaagtttgaaaacaatacgtacggttattgtgaaaaaacaggcgcccccattccgattgaaaaacttgcggtgctgccgacggccagaaccgctgatgatttttattatcccgctcaatttgaaaagaaaacccttccatactgggtaaccggagattatgcatatgatcaggcgctgtatgagtgacagcgtctgtttgcatacgcttatgatctgcctttactccggcatcttttactgataaaattcataaaggataaaagtaactgtatactggaggaacgtgtgtgctttattatcttatcgctctttttattattattgccgaccaattgaccaaatggcttgtcgtcagccatatggaattgggacaaagcatacctgtcatcgaccaggtgctttatatcacatctcatcgcaacacgggagcagcgtgggggattttagccggccaaatgtggtttttctacgtcattaccatcgccgtgattatcggaatcgtttattacatacagcgttatgcaaaagggcagatgttactcggaatttctctcggcttaatgctgggaggtgcggccggaaactttattgaccgggcggcgcgccaggaagtggtggattttattcatgtcatcatcgtggattatcactatccgatttttaatatcgcggactcctcactgtgcgtcggtgtaatacttttatttattcatatgctgtttgacagcgggaaaaagaaggagcaataacatgaatcaatttgagataaccgttcagcctgaacaaaagagcgaacggattgataaatttttggcttcaacgggagaaaactggtcacgcactcaagtgcagcaatgggtaaaagagggactggtatccgttaacggcaaatccgtaaaagcgaattataaaatgcagcccggcgatcaggtaaacgtcaccattcctgaaccggaagaattggacgtgcttgcagagccgatggatttggacatttactatgaagaccaggatgtcttggttgtgaacaaaccgcggggcatggtcgtacacccggcgcccggccatgtgacagggacgctcgtaaacggactgatggctcactgcaacgatctttcaggcattaacggcgtcatgcgcccgggaatcgtccaccggattgataaagatacctccggcctgttaatggtcgccaaaaacgatatggcgcatgaatcactcgttaatcagctcgtcaataaaaccgtgacgagaaagtacacagcggttgtccacgggttgatttcacatgatgacggaacgattgacgctccgatcgggagagataaaaaagaccgacaaagcatgaccgtaacaagagaaagcagcaaaaacgccgtcacgcatttccacgtgcttgagcgttttcaagacttcacgctcgtagagtgccgtcttgaaaccggaagaacgcatcagatccgtgttcatatgaaatatatcggatttcctttggcaggcgacccgaagtacggaccgagaaaaaccattgatttcaacggtcaggcgcttcatgccggaatattaggttttgaccatccgcggacgggcgaatacatggagtttgaagcgccccttcctgaagatatgaaaaaactcattgaacatttgagaaatagccattgacagcgagtttcttttctgaaataataaaaacaagctgaatagattctttaacacagtccagagaggctgagaaggataacggataggacagaagagatacacgtgtgtcttggtcctggaaaggaacccctctatgctctggcaggaggggttttttcttcttatatacgaatggagaggtgtcacgattgaatcaaaaagctgttattctcgacgaacaggccatcagaagggcgctgacaaggatagcccatgaaatgatcgaacggaataaaggaatgaatgactgcattcttgtagggattaaaacaagaggtatttatttagcgaagcggctggccgagcggatcgaacagattgaaggaaatccggtcaccgtcggggaaatcgatatcaccctttaccgtgacgatctcacaaaaaaaacgagcaatgaagagccgcttgtaaaaggcgcggacattccggccgatatcacagaccaaaaggtcattgtggttgatgatgtgctttataccggccggacggtgagagctgcgatggatgctctcgttgatgtcgggcggccgtcatcgatacagcttgccgtgcttgtcgacagaggacaccgggagctgccgatcagagcggactatatcgggaaaaacattccgacctcaaaagctgaaaaagtgatggttcagctgagcgaagttgatcagactgatatggtcgccatttacgaaaatgaataaccaccctttttaaatgcattccagagagtttgcaaagaggattttaaaacacaaagccgggcggatcgacacggccgggctttgtatgcctctttgcgcaaaaagcaaagaggtttttttataccatttgaaagtcaaccgggaggaaaacgccatgagtaagaaaaaagtaaacctgggagtcagggacgtccccaatccattgtcctggctgtcattcagcctgcagcatttattcgccatgttcggttcaaccatactcgtgccgaaactggtcggaatgagcccggcagtggcgcttgtcacgagcggaatcgggacactcgcctatctcttggtgacaaaaggccagattcccgcttatctcggctcatcattcgcctttatatcaccgattatcttggtgaaggcgacgggagggccgggggctgccatggtcggcgctttcctggcgggaattgtgtacggcctgatcgcgcttctcatcaggcagcttggaacggggtggctgatgaagctgctgcccccggtggtcgtcgggccggtcatcatcgtcatcggcctcggactggcaagcacagccgtcaatatggcaatgtatgctgatccgaatgcgaaggaactcgtttacagcctgaaacatttcagtgtagccggcgtcactttggccatcaccattatctgcgccatctttttacgaggatttttaagcttgattccggtattgatcggcattataggcggatatctgtttgcgctgacacagggcatcgtcaattttcagccggtcattgatgcaaaatggttcgccgttcctgaatttatcatccctttcaaagactacacgccgtcagtgacattgggcattgccgctgcgatggtgccggtcgctttcgtgacgatgtcagaacatatcggccaccaaatggtgctgagtaaagtcgtcggacaggattttattaaaaagccgggactgcaccgctccataatgggggacagcgtagcgacgattatcgcttcgttaatcggcggcccgccgacgacaacatacggcgaaaacatcggtgtcctggcaattacgagagttttcagcgtctttgtcatcggcggcgcaggagtgattgcgctgtgcttcggatttatcggcaaagtttcagcgctgatcagctctgttccgtccgcggttatgggaggcgtttccttcctgctcttcggaatcattgcctccagcggcttgagaatgctgattgacaacaacattgattatgaaaacaagcgaaatttaattatcacatccgtcatcctcgtgatcggcgtcggaggggcttttattcaagtatcaaaaggcgggttccaaatatccggcatggcgcttgcggcaatcgtcggagtcatcctgaaccttatcctgccgcatgcaaatgaagaagacgcgattgcatcggaaaaactaaatcatatgtaaaccttttaaagaaagtccagagaggcttggaagggttataacgggaagacgctgtacggctcttctctctttaaccgcaccccgagtctatagaccggggtgttttttacggccttcaagcggaaacggaggagaaaaaacatgaatcatttaacggcgatgtctgaactgagcgcggctgaaattacagaactgctgcgagaggcaaaagcgataaaagagggtgcagtccgtcccgatctcgcgggaaaattcgttgcgaatctgttttttgaaccgagcacgagaacgcggttcagctttgaagtggcggaaaagaaactcgggatgaacgtgctcagcttagacggcacgagcacaagcgttcaaaaaggcgagtccttatacgacacggtcaaaacactggaatcaatcggagcggacgcctgcgtcatcaggcacagcacggatgaatattacaaagatctgaccggcagagtcaatattccggtcttaaacgcaggagacggctgcggacagcacccgacccagtcattgcttgatttaatgacgattcaagaggaatttgagacctttcagggcctgacggtttccattcatggcgatatcaaacacagcagagtggcaaggtcaaatgccgaggtgctgacaaggctcggcgcacgtgtgctgttttccgggccgccgcagtggcaggatgagaaaaacgccttcggcacctgtgttcagacggatgaggccatacaagcttcagatgtcgtcatgctgctccgcatccaaaatgaaaggcatcagacagaagccgaccaaaaaggctacctggaagcatacgggctgaccgaaaagcgggcgcagagcatgaagcggcatgctatcatcatgcatcccgcaccggtgaacagaggagtcgaaattgacacaacattagtggaatgcggaaaatcaagaatctttaaacaaatggaaaatggtgtgtatatcagaatggcagtcttaaaaagagcactgcaaaccaatgtgaaaaggggagaagcggcttatgtcttatctcattaaaaacggctggatattaaatgaacagggagaaaaagcggtacatgatatccgggtaacgggtgaattcatttcggaaaccgggcttctgacagcgaaagacggagaaacggtgatcgacgctgagggactgttcgtttcacctgggctcgtagaccttcatgtccacttcagagaaccgggcggcgagaaaaaagaaaccattgagacgggctctaaagccgcggcgcggggcggttttaccacagtcgccgccatgccgaatacaaggccggtgccggatacgaaagagcagatggaatggctgcaaaacaggatcaaagaaacctcatctgtcagggtccttccttacgcatcgattacgatcagacaaaccggcgaagagatgacagattttgaggcgcttcatgaagcgggcgcattcgccttcaccgatgacggcgtcggagttcagacggccggaatgatgtatgaagccatgaaacgggcggcttcaataaataaagcgattgtcgctcattgtgaggataactcacttatttacggagggagcgtgcatgaaggttctttttcaaaagcgaacggcctgaagggtataccttccatttgtgaagcggtacatatcgcccgtgacgtgctgctggcggaagcggcgggctgccattaccacgtgtgtcatatcagcacgaaagaatccgtcagagccgtaagagacgcaaaaaaagcgggcatccgcgtgacggcggaagtatcgccgcaccacctgctgctttgtgacgaagatatcccgggacttgataccaattttaagatgaatccgccgcttcgcagcaaagaggacagagaggcgctgattgaagggcttttagacggcacgattgatttcatcgccactgaccatgcgccgcatacagaagaagagaaaaacacggacatgaagcttgcgcctttcggtattgtcgggttagaaactgcctttccccttctgtacacacattttgtgaaaaacgggacgtggacgctgaagcagctggttgatttcatgacggtaaaaccttgcgaggcattcggtcttccgtacggaacgcttgcaccgggggcgccggctgacatcaccctaattgatctggacaaagaagcggccattgacaaagatacatttttatctaaaggaaaaaatacgccattcaacaagatgaagtgcttcggctggcctgttgcaacgatggctgccggtaagcttgcatatgaagaagggagactcgtcaaatgaaaagaagactagtgctggaaaatggagcggtatttgagggtgaagcattcgggagcctggagcataccgcgggtgaagtcgtattcaacacgggaatgaccggttatcaggaaattttatcagacccttcttactgcgggcagatcgtgacgctgacgtatccgctgatcggcaactacggaattaacagagatgactttgaatctatcactccttttgtaaaagggctgatcgtaaaagaactgtgcgagctgccttccaactggcgctcagcttacacgcttgatgagtatctgaaaatgaaaaaaatccccggcttacaagggatcgacacgcgaaaactcaccagaatgatccgcacggccggggcattaaaaggaacgtttgcttcaagtgaggagaatgtcggagaggttcttgcaaggctgaaagaaacggaactgccgagaaatcaagtcgctcaagtatcggcgaaaacggcatatccgagtccgggccgcggcaaacgcatcgtgctcgtcgatttcggtatgaagcacggcatcttaagagagttaaacaaaagaaaatgcgatgtcatcgttgtaccgtacaatgtaacggcggaagaagtgcttcagctcaagccggacggcatcatgctttctaacggacccggagatccgaaagatgtgccggaagccattgaaatgataaaaggcatactcgggaaggtgccgttattcggaatctgtctcggccatcaattatttgcgctggcatcgggagcggaaacggaaaaaatgaaattcggacacaggggttccaatcatccggttaaagagcttgcgacagggaaagtcgctttaacagcccaaaaccatggatatacagtttcttcaatagatgagacagagcttgaagtgacgcacattgcgatcaatgatcaaacgatcgaaggactcaagcataaaacattgccggcatttacggttcagtaccaccctgaagcttcaccgggaccggaagacgccaatcacttatttgacagattcattgacttgatcgaaacaactgagaaagaaggggaagcggtatgccaaaacgcgtagatattaaaaagattttagtgatcggatcaggcccgattattatcggacaggcggcggaatttgattatgcgggcacacaggcgtgtctcgctttaaaggaagaaggctatgaagtcattctcgtcaactcgaatccggcaacgattatgacggatacggaaatggctgatcgggtatacatagaaccgctgacgccggagtttctcacgcgtattatcagaaaagaacggccggacgccatcctgccgactctgggaggacagaccggactgaatcttgccgtcgagctgtctgaactcggggttcttgaggaatgcggagtggaagtgctcggcacaaagctgtccgccatccagcaggctgaagaccgcgacttattccgtacgctgatgaatgagctgaatgaaccggtgccggaaagtgagatcatccgcactttacaggaagccgaggaatttgtcggccggatcgggtttccggttatcgtgcgccccgcttacacattaggcggaacgggcggcggcatctgctcgaatgaagcggaactgaaagagatcgtcgaaaacggattaaagctcagccccgttcatcagtgccttctggaaaaaagcatcgccggttacaaagagatcgaatatgaagtcatgagagacagcagagatcacgcgatcgtcgtctgcaacatggaaaatatcgatccggtcggcatccatacgggcgacagcatcgtcgttgccccgagccagactttgagcgaccgggaatatcagcttttgcgcaatgtttcattaaagctgatccgcgcgctcggcattgaaggcggctgtaatgttcagctcgcgctcgatcccgacagcttccaatattacattatcgaagtgaatccgcgagtgagccgctcatctgccctcgcttcaaaagcgacgggttacccgatcgcaaagcttgcggcgaaaatcgcagtcgggctttctcttgatgaaatgatgaatcccgtaacgggaaaaacatatgcggcttttgagcccgcgcttgactatgtcgtttctaaaatcccgcgctggccgttcgacaaatttgagtcggcaaaccgcaggctcgggacgcagatgaaagccaccggagaggtcatggccatcggacgcacccttgaagaatcgctgttaaaggcggtccgctcactggaagccgatgtctatcacctggaactgaaggatgcggaagagatttctgacgggcttttggaaaaacggatcagaaaggccggagatgaacggctgttttatcttgcagaagcgttcagaagaggctacacagtggagcagcttcatgagttttccgcaattgacgtattctttttgcacaagctctgtaagctggtcgcttttgaaaccgagctgaaagcggaaaaaggcagcctcgccgtcctgcagacagcgaaggaactcggtttctccgacaaatatatcagccgggaatggaatatgccggaacaagagctgtatcaaatgcgaaaagaagcagccatcaagcctgtatataaaatggtggatacatgcgcggcggaattcgaatcagaaaccccgtacttctacagcacatatgaggaagaaaacgagtctgaggtaacatcaagaaaaagcgtcgtcgtcctcggctccggcccgatccgcatcggacagggcgtcgaatttgactatgcgaccgttcactctgtctgggcgattaagcaggcaggatatgaagcgattattatcaacaacaaccctgagacggtgtccactgatttcagcatatcagacaaactgtattttgaaccgctgacggtagaagatgtcatgcacatcattgatttggaacagccggaaggcgttgttgtccaattcggcggccagacggcgatcaaccttgcggaagaattgagcgcccgcggcgtcaaaattctcggtacatcacttgaagatttagaccgtgcggaagaccgggataagttcgagcaggcgcttgaggcgctgaatgtgccgcagccgctcggaaaaaccgccgtgtcggtgaacgaagcggtcaaaatcgctgcatccatcggctatccggtacttgtccgcccttcgtatgtgctcggcggccgggcgatggaaatcgtctatcacgaagaagaactgcttcactatatgaaaaatgcggtcaaaatcaacccgcagcatccggtgttaatcgaccgttatctgacggggaaagaaatcgaagtcgatgccgtatctgacggcgaaacagtcgttattccggggattatggagcatatcgagcgggccggcgtccattcaggggattcaatcgccgtctatccgcctcagtctttaagcggagacattaagaaaaaaatcgaacaatacactgttgccttggcaaaaggccttaacatcatcgggttgctgaacatccagttcgtactttcgcaaggtgaggtgtatgtgcttgaggtaaatccgcggtcaagcagaaccgtgccgttcttaagcaaaatcactaagattccgatggcgaatctggcgacaaaggtcattctcggccaaaagcttgctgatttcggctatcaagaggggctgcagcctgaacagcagggggtgttcgtgaaagcgcctgtcttctcattcgcgaagctgagaagagtggatatcacgttaggccctgaaatgaagtcgacgggagaggtcatgggcaaagattcaaccttggaaaaagcgctctataaagcgctgattgcctcaggcattcaaatcccgaactacggttcagtgctgttgaccgttgctgataaagataaagaagaaggactgctgatcgccaagcggttccacgccatcggctataaaatcttggcgacggaaggaacggcggcttatttgaaagacgctcagattccggctcaagtcgtcgggaaaatcggcgaagaagggaaaaatctgctcgatgtgatcagaaacggagaagcgcaatttgtcatcaatacgctgacaaagggcaaacagccggccagagacggcttcagaatccgccgcgaatccgttgagaacggagtcgcctgcctgacatctttagatacggccgaagccattttgcgggtattggaaagcatgacattccgggcggatcatatgcctgcatccgaaaccaatcaaaaggcggcagtcacgatatgaaaaaagcgcatttgactgttcaatccaacttagaaattgccgaccggatttataagatggtgctgaaaggagagcttgtccggcaccttaccgagccgggacaatttcttcatctgaaggtgagtgacgcggtcacaccgctattaagaagaccgctcagcattgcggacgtcaatttcgccgcggatgaagtatccgttatctacagagctgacggtgagggaacgcgccttttgtccgggaaaaaagagggcggcaaaatagacgttctcggccctctcggcaacggatttcccgtgcggcggattgaacccggcaaaaccgcgctgttagtcggaggcggagtgggggttccgcctttgcaggaactgtcaaagcgcctgacggaaaaaggcgtaaacgtcattcatgtgcttggatttcaatcagcaaaggatgttttttacgaacaggaatgccgtgcgtacggagacacttatgtggcgacggctgacggaacatatggagagaaaggatttgtcaccgatatcatccgtgaaaagcagctcgaattcgatgtcctgctaagctgcggaccgacaccgatgctgaaagctctgaagcagcagtacggccataaagaggtttatctttcgatggaagagcggatgggctgcggcatcggggcctgcttcgcctgcgtgtgccgcacgggtgaaagcgatacatcctatgtaaaggtctgccttgacgggccggtatttaaagctgaggaggtggcgctgtaatgttagaggtgaatctgccgggtctccaattgaaaaacccgatcatccccgcttccggatgtttcggtttcgggaaagaatatgccggattttacgatttatcatgccttggaggcattatgattaaagccacgacgaacgaagcccgcttcggaaatccgacgccgagagtggcggagacaagcgcgggaatgctgaatgccatcggactgcaaaatcccggccttgagcatgtgctcaatcacgagctgccttggctcgaacaatttgacacgccgattatcgcaaatgtcgccggttctcaggtggacgactataaagaagtggccgagcacatcagccaagcgccgaatgtgcatgcgcttgagcttaacatttcatgtccgaatgtcaaaacggggggattgcttttggtactgatcccgtcatggcggccgaactgacaaaagcggtgaaagaagtttccgcagtgcctgtgtatgtgaagctttcgcctaatgtcgcaaacatagccgaaattgccaaagcgattgaagcggccggtgctgacggtctgacgatgattaatactctcatcgggatgaggctcgatctcaagacgggccggccgattttagcaaataaaacgggcggactgtcaggcccggcgatcaaaccggtcgccatccggatggtatacgaagtcagccaggccgttcaaattccgattatcgggatgggcggcgttcagaccgcagaggatgcattagaatttcttcttgcgggagcgagtgcggttgccgtcggcacggcgaacttcgtcaatccgttcgtctgcccggaaatcatagaacagctcccccacgtgctgcgccaacacggctttcaatctgtaagtgaatgcatcggaaggagctggaaacatgaaaaacaacctgcccatcatcgcgcttgattttgcatcaggggaagagactttaacgtttttagacttgtttgaaaaggaaaggctctttgtcaaaacggggatggaacttttttatcaggaaggccccgccatcattcaccaattaaaagaacggaactgtgatatatttttagatttaaagcttcatgatatcccgactacggtcaataaagcgatgaagcggctggccggcctcggcgttgatctcgtcaatgtgcatgcggcagggggcgcacgcatgatgcgcgcggcccttgaggggcttgaagaaggcacgccggcaggcagaaaacgcccgtctttaatcgcggtgactcagctgaccagcacttcagagcaggtggcgaaggaagagcttctgctgcataagccgctgttagaaacggttgtgcattacggcaaaatggcggaagagtgcgggctggacggagtggtatgttcggtccatgaaacaaaagccatttatgaagcggtccggccttcatttctgacagtcacgccgggcatccgcaccgccagtgacgcagctgacgatcaagtccgtacggcgactccgtcatttgcgaaagaaaacggttcgtcagccatcgtcgtgggccgctcaattacaaaagcggaaaaccccgttaaagcatatgaagcaattaaactggaatgggagggcgttcgccgatgaaacaggctatcgcaaaacatctattacacattgaagctgtctttttacgcccgaat

(The sequence listing continues in the following parts.)
